(19) United States
(12) Patent Application Publication
(10) Pub. No.: US 2005/0123910 A1
(43) Pub. Date: Jun. 9, 2005

(54) Enzyme and snp marker for disease

(76) Inventors: William Osmond Charles Michael Cookson, Oxford (GB); Miriam Fleur Moffat, Bicester (GB); Maxine Allen, Oxfordshire (GB); Nick Lench, Cardiff (GB)

Correspondence Address: FISH & RICHARDSON P.C., 3300 DAIN RAUSCHER PLAZA, 60 SOUTH SIXTH STREET, MINNEAPOLIS, MN, 55402, US

(21) Appl. No.: 10/476,264

(22) PCT Filed: Apr. 24, 2002
(86) PCT No.: PCT/GB02/01887

(30) Foreign Application Priority Data
Apr. 24, 2001 (GB) 0110044.5
Apr. 24, 2001 (GB) 0110046.0
Oct. 12, 2001 (GB) 0124594.3
Oct. 12, 2001 (GB) 0124575.2

(51) Int. Cl. C12Q 1/68

(52) U.S. Cl. 435/6

(57) ABSTRACT

The present invention relates to an isolated nucleic acid sequence which encodes a novel protein, where the protein is a new member in a family of enzymes with peptidase activity. Also provided is the use of the nucleic acid sequence and/or protein in medicine and research, a method for diagnosing, or determining predisposition to disease, methods for preventing or treating disease, and kits for use in the methods and the use of the nucleic acid sequence, protein and inhibitors thereof in treating or preventing inflammatory diseases, and in screens for identifying new inhibitors. Also provided are nucleic acid expression vectors, host cells, screens and non-human transgenic animals.

[0001] The present invention relates to an isolated nucleic acid sequence which encodes a novel protein, where the protein is a new member in a family of enzymes with peptidase activity. Also provided is the use of the nucleic acid sequence and/or protein in medicine and research, a method for diagnosing, or determining predisposition to disease, methods for preventing or treating disease, and kits for use in the methods and the use of the nucleic acid sequence, protein and inhibitors thereof in treating or preventing inflammatory diseases, and in screens for identifying new inhibitors. Also provided are nucleic acid expression vectors, host cells, screens and non-human transgenic animals.

[0002] The diseases of asthma, eczema and hay fever are typified by Immunoglobulin E mediated reactions to common allergens. These diseases are known as “atopic”. They are increasing in prevalence, and are now a major source of disability throughout the developed world. They are the result of complex interactions between genetic and environment mechanisms. The atopic state is characterised by prolonged exuberant Immunoglobulin E (IgE) responses to common inhaled proteins, known as allergens. Atopy is accompanied by elevation of the total serum IgE concentration, and by the presence of IgE specific to allergens. This specific IgE may be measured directly in the serum, by ELISA or other techniques. It may also be detected by prick skin tests, in which minute traces of allergen are introduced through a prick in the skin surface: atopic individuals respond to the test with a visible wheal on the skin surface.

[0003] Asthma is a major cause of disease in children and young adults and is becoming more prevalent and is the most common disease of childhood and arises due to the interaction between strong environmental and genetic factors. Asthma may be identified by intermittent mucosal inflammation, wheezing, and shortness of breath.

[0004] Asthma is usually recognised epidemiologically by standard symptom questionnaires or by physician diagnosis. Physician-diagnosed asthma ascertained by questionnaire has a heritability of 60-70%. Linkage to asthma and its associated phenotypes has been demonstrated near the IL1 cluster on chromosome 2. Genome-wide scans for linkage to atopy and asthma-associated phenotypes have identified the marker D2S160 on chromosome 2q14 near the IL-1 complex which has been associated with “wheeze” (p-0.001). As the region contains IL-1 and its homologues, it was investigated for association between asthma and known SNPs in IL1 cluster genes. Contrary to expectations there was no association found to these known polymorphisms in a combined panel of 246 families containing 1122 individuals and 381 asthmatics. However a replicated association between asthma and alleles of a D2S308 microsatellite, approximately 1 Mb distant from the IL1 genes, has been found.

[0005] The genetic factors which predispose an individual to asthma are thought to be variants of DNA structure (“polymorphisms”) that alter the level of expression or the function of genes. Variants of DNA sequence at a particular site (“locus”) are known as “alleles”.

[0006] Disease causing alleles will be in linkage disequilibrium with non-functional polymorphisms from the same chromosomal segment. It is therefore possible to detect allelic association with disease from particular chromosomal segments, without identifying the exact polymorphism and gene underlying the disease state.

[0007] The detection of allelic association may therefore give information as to disease susceptibility in a particular individual. Furthermore, allelic association is indicative of exons of a disease-causing gene are usually present within a limited distance (50-500 Kb) of DNA in either direction from the allele.

[0008] Identification of genetic polymorphisms in linkage disequilibrium with asthma. or atopy will allow the identification of children at risk of such diseases before the disease has developed (for example immediately after birth), with the potential for prevention of disease. The presence of particular polymorphisms or combinations of polymorphisms may predict the clinical course of disease (e.g. severe as opposed to mild) or the response to particular treatments. This diagnostic information will be of use to the health care, pharmaceutical and insurance industries.

[0009] Oligopeptidases are endopeptidases that act only on smaller polypeptides or oligopeptides. These enzymes perform important, specialized biological functions that include the modification or destruction of peptide messenger molecules. Oligopeptidases have few naturally occurring inhibitors, and their distinctive specificity prevents them from interacting with α2-macroglobulin, unlike the great majority of endopeptidases. Members of the prolyl-oligopeptidase family S9 (enzyme nomenclature committee EC 3.4.14.5), subfamily S9B include DPP4, DPP6, DPP8 and DPP9. The S9 family contains serine proteases with a varied range of relatively restricted substrate specificities. S9 peptidases are either soluble, cytosolic proteins or integral type II membrane-bound proteins and do not appear to exist as pro-enzymes, and are synthesised in an active form. The active site triad, Ser, Asp, His has been identified in DPP4, DPP6, DPP8, and DPP9, although the putative catalytic serine. residue is substituted with aspartate in DPP6 and glycine in Drosophila Melanogaster CG9059. In all known members of the family, these residues are within 130 residues of the carboxyl-terminus. All members of the prolyl-oligopeptidase family contain a conserved 7 amino-acid motif DW(V/I/L)YEEE in the predicted β-propeller domain. Two of the glutamate residues within this conserved motif have been shown to be essential for serine protease enzyme activity. The membrane-bound members of the S9 family contain membrane-spanning domains near the amino-terminus. Prolyl-oligopeptidases are responsible for cleaving the C-terminal peptide bond adjacent to a di-peptide sequence Ala-Pro or Gly-Pro. Substrates for these enzymes include chemokines, growth factors, and neuro- and vaso-active peptides.

[0010] Certain cell surface peptidases have been identified as specific antigens of immune cells. These include DPP4 (CD26), neutral endopeptidase (CD10), and aminopeptidase N (CD13). These cell surface antigens play an important role in the differentiation of immune cells. It has also been postulated that prolyl-olgopeptidases may play a role in the alteration of the Thl/Th2 (T-helper cell) balance during the inflammatory process. DPP4 (CD26) has been shown to have multifunctional properties in addition to its peptidase activity.

[0011] Based on it's proposed structure DPP4 (CD26) is predicted to be a multifunctional protein and has been shown to interact with several proteins outside of it's catalytic domain. DPP4 (CD26) is an adhesion receptor for both collagen and fibronectin and has been shown to mediate the lung colanisation of breast cancer cells in a rat model, an effect mediated primarily through fibronectin binding. DPP4 (CD26) can also bind adenosine deaminase, an enzyme that metabolises adenosine to inosine. The location of the DPP4/ADA complex at the cell surface is an important mechanism which regulates the effective concentration of adenosine in the vicinity of it's receptor. Adenosine suppresses T-cell activation through interaction with the A2a G-protein coupled receptor. Adenosine therefore plays an important role in suppression caused by ADA deficiency.

[0012] DPP4 (CD26) also plays an important role in T-cell signaling through interaction with CD45, protein tyrosine phosphatase. While the counter-receptor for DPP4 (CD26) has not yet been identified, cross-linking of DPP4 (CD26) with antibody induces tyrosine phosphorylation of a number of molecules known to be important in T-cell activation including p56Ick, P59fyn and ZAP-70.

[0013] Of the S9B prolyl oligopeptidases, DPP6 homologues have been cloned from Bos taurus, Rattus norvegicus and Mus musculus. DPP6 has been reported to exist as 2 different isoforms (DPPX-S and DPP-L) as a result of alternative mRNA splicing and possible differential (tissue-specific) promoter usage. DPPX-S and DPPX-L demonstrate differential tissue expression. Given that the two forms have different cytoplasmic domains, this may form the basis for different transmembrane signalling systems. DPP6 has no detectable catalytic activity, most likely due to the substitution of serine for aspartate in the catalytic triad. In vitro mutagenesis of aspartate to serine failed to restore catalytic activity.

[0014] To date, various markers of inflammatory diseases such as asthma and atopy have been identified, and used to identify those people at risk of such disease. Notably, however, there has been no success in linking such markers with a gene whose activity may be at the root of inflammatory disease. The identification of this gene will enable the provision of valuable diagnostic, therapeutic and research tools.

[0015] According to a first aspect of the invention there is provided an isolated nucleic acid sequence comprising a sequence as shown in FIG. 4, or a sequence as shown in FIG. 4 which excludes one or more of the exon sequences as set out in FIG. 10 and/or FIG. 4 when one or more of the exon sequences are replaced with one or more alternate exon sequence or one or more liver clone sequence from FIG. 9 or a sequence complementary or substantially homologous thereto, or a fragment thereof. The sequence of FIG. 4 is the human DPP10 mRNA sequence. FIG. 4 is compiled of the exons as shown in FIG. 10. Alternate exons are shown in FIG. 9. Alternative exons are referred to by different letters, for example exons 1a, 1b etc are alternate sequences for exon 1 (likewise for exons 2A, 2B etc). Upper or lower case designation of exons does not have any significance. Alternate transcripts for FIG. 4 can be seen schematically in FIG. 6. In addition, there is provided an isolated nucleic acid sequence comprising the sequence shown in FIG. 5a and/or a sequence as shown in FIG. 5a which excludes one or more exons or a sequence as set out in FIG. 5a when one or more of the exons are replaced with an alternate exon from FIG. 8. FIG. 7 shows a schematic overview of mouse transcripts, or a sequence complementary or substantially homologous thereto, or a fragment thereof. The sequence of FIG. 5a is the mouse DPP10 cDNA sequence. The mouse DPP10 mRNA sequence is shown in FIG. 5. The DPP10 nucleic acid sequence can comprise any combination of one or more exons from 1a, 1b, 1c, 1d, 1e, 1f, 1g, 2a, 2b, 2c, 2d, 2e, 2f, 2g, 3, 4, 5, 6, 7, 8, 9, 10, 11, 12, 13, 14, 15, 16, 17, 18, 19, 20, 21, 22, 23, 24, 25 or the sequences of liver clones 1, 2 or 3 or a sequence substantially homologous thereto, or a fragement thereof. These combinations are for all DPP10 sequences including human and mouse—where the exons of the mouse do not include if or lg.

[0016] The following isolated nucleic acid sequences are part of the first aspect.

[0017] There is provided an isolated nucleic acid sequence comprising one or more of the exons of DPP10, for example those exons shown in FIGS. 6, 7, 8, 9, 10 or 15 or the sequence set out in FIG. 2c, a sequence complementary or substantially homologous thereto, or a fragment thereof.

[0018] There is provided an isolated nucleic acid sequence comprising the exon sequence of FIG. 2a, or a sequence which is complementary or substantially homologous thereto.

[0019] There is provided an isolated nucleic acid sequence comprising exons 1a and 2 to 25, or a sequence which is complementary or substantially homologous thereto, or a fragment thereof (Transcript 1), FIG. 10.

[0020] There is provided an isolated nucleic acid sequence comprising exons 1b, 1c and 2 to 25, or a sequence which is complementary or substantially homologous thereto, or a fragment thereof (Transcript 2), FIGS. 9 and 10.

[0021] There is provided an isolated nucleic acid sequence comprising exons 1b, 1c, 1d, 1e and 2 to 25, or a sequence which is complementary or substantially homologous thereto, or a fragment thereof (Transcript 3), FIGS. 9 and 10.

[0022] There is provided an isolated nucleic acid sequence comprising exons 1f and 2 to 25, or a sequence which is complementary or substantially homologous thereto, or a fragment thereof (Transcript 4), FIGS. 9 and 10.

[0023] There is provided an isolated nucleic acid sequence comprising exons 1g and 2 to 25, or a sequence which is complementary or substantially homologous thereto, or a fragment thereof (Transcript 5), FIGS. 9 and 10.

[0024] There is provided an isolated nucleic acid sequence comprising exons 1a and 2A, or a sequence which is complementary or substantially homologous thereto, or a fragment thereof (Transcript 6), FIGS. 9 and 10.

[0025] There is provided an isolated nucleic acid sequence comprising exons 1b, 1c and 2B, or a sequence which is complementary or substantially homologous thereto, or a fragment thereof, FIGS. 9 and 15.

[0026] There is provided an isolated nucleic acid sequence comprising exons 1b, 1c and 2C, or a sequence which is complementary or substantially homologous thereto, or a fragment thereof, FIGS. 9 and 15.

[0027] There is provided an isolated nucleic acid sequence comprising exons 1b, 1c and 2D, or a sequence which is complementary or substantially homologous thereto, or a fragment thereof, FIGS. 9 and 15.

[0028] There is provided an isolated nucleic acid sequence comprising exons 1b, 1c and 2E, or a sequence which is complementary or substantially homologous thereto, or a fragment thereof, FIGS. 9 and 15.

[0029] There is provided an isolated nucleic acid sequence comprising exons 1b, 1c and 2F, or a sequence which is complementary or substantially homologous thereto, or a fragment thereof, FIGS. 9 and 15.

[0030] There is provided an isolated nucleic acid sequence comprising one or more of the mouse exons of DPP10, for example those exons shown in FIG. 5, 5a, 7 or 8, or a sequence complementary or substantially homologous thereto, or a fragment thereof. There is provided an isolated nucleic acid sequence comprising mouse exons 1a and 2 to 25, or a sequence which is complementary or substantially homologous thereto, or a fragment thereof (Mouse Transcript 1), FIGS. 5a, 7 and 8.

[0031] There is provided an isolated nucleic acid sequence comprising mouse exons 1c, 1d and 2 to 25 or a sequence which is complementary or substantially homologous thereto, or a fragment thereof (Mouse Transcript 2), FIGS. 7 and 8.

[0032] There is provided an isolated nucleic acid sequence comprising mouse exons 1e and 2 to 25 or a sequence which is complementary or substantially homologous thereto, or a fragment thereof (Mouse Transcript 3), FIGS. 7 and 8.

[0033] There is provided an isolated nucleic acid sequence comprising mouse exons 1b, 1c, Id and 2 to 25 or a sequence which is complementary or substantially homologous thereto, or a fragment thereof (Mouse Transcript 4), FIGS. 7 and 8. Promoter sequence for DPP10: A consensus palindromic IFN-gamma activation site (GAS) element was identified 18181base pairs upstream from Exon 1b. The GAS site is underlined. Represented in italics are other important promoter motifs: a CATT box and a TATA box.

CCATTCTCTTTGTTTTTATTCGGGATGCTCTTATTTCCAAGAAGGCTTATAAA

[0034] This motif is also present in the promoter of the CD26/dipeptidylpeptidase IV (DPP4) gene (a member of the prolyl oligopeptidase S9B subfamily). Interferons (IFNs alpha, beta and gamma) and trans retinoic acid (RA) have the ability to activate genes with GAS sites.

[0035] All the sequences of the present invention are isolated, or alternatively may be recombinant. By isolated is meant a nucleic acid or polypeptide sequence which has been purified, and is substantially free of other protein and nucleic acid. Such sequences may be obtained by PCR amplification, cloning techniques, or synthesis on a synthesiser. By recombinant is meant nucleic acid sequences which have been recombined by the hand of man.

[0036] The polynucleotide sequences of the invention may be genomic or cDNA, or RNA, preferably mRNA, or PNA. In the present invention, gene products include polynucleotide sequences and protein. References to polypeptide sequences include proteins and peptides.

[0037] In the present application, sequences which are complementary or substantially homologous are those sequences which hybridise under stringent conditions to the defined sequence or its gene products. Thus, for example, a nucleic acid sequence substantially homologous to a reference nucleic acid will be capable of hybridising to a gene product (i.e. mRNA) of the reference nucleic acid, under stringent conditions. A complementary sequence is one which is capable of hybridising to the nucleic acid. sequence itself, under stringent conditions. Also provided in the present invention are complements of the substantially homologous sequences. A substantially homologous sequence preferably has at least 75, 76, 77, 78, 79, 80, 81, 82, 83, 84, 85, 86, 87, 88, 89, 90, 91, 92, 93, 94, 95, 96, 97, 98 or 100% sequence identity with the defined sequence. This definition of substantially homologous applies to both nucleic acid and polypeptide sequences. Thus, polypeptide sequences having conservative amino acid substitutions that do not affect structure or function are also included. For any given DNA sequence, references to a complementary sequence include the corresponding mRNA sequence and any cDNA sequence derived on such an RNA sequence. “% identity” is a measure of the relationship between two nucleic acid or polypeptide sequences, as determined by comparing their sequences. In general, the two sequences to be compared are aligned to give a maximum correlation between the sequences. The alignment of the two sequences is examined and the number of positions giving an exact amino acid or nucleotide correspondence is determined, and divided by the total length of the alignment, and the result is multiplied by 100 to give a % identity. The % identity may be determined over the whole length of the sequence to be compared, which is particularly suitable for sequences of the same or similar lengths or for sequences which are highly homologous, or over shorter defined lengths which is more suitable for sequences of unequal lengths and with a lower homology.

[0038] Methods for comparing the identity of two or more sequences are known in the art. For example, programs available in the Wisconsin Sequence Analysis Package version 9.1 (Devereux J et al., Nucl Acid Res 12 387-395 (1984), available from Genetics Computer Group, Madison, Wis., USA), such as BESTFIT and GAP may be used.

[0039] BESTFIT uses the “local homology” algorithm of Smith and Waterman (Advances in Applied Mathematics, 2:482489, 1981) and finds the best single region of similarity between two sequences. BESTFIT is more suited to comparing two polynucleotide or two polypeptide sequences which are dissimilar in length, the program assuming that the shorter sequence represents a portion of the longer. In comparison, GAP aligns two sequences finding a “maximum similarity” according to the algorithm of Neddleman and Wunsch (J. Mol. Biol. 48:443-354, 1970). GAP is more suited to comparing sequences which are approximately the same length and an alignment is expected over the entire length. Preferably, the parameters “Gap Weight” and “length Weight” used in each program are 50 and 3 for polynucleotide sequences and 12 and 4 for polypeptide sequences, respectively. Preferably, % identities and similarities are determined when the two sequences being compared are optimally aligned.

[0040] Other programs for determining identity and/or similarity between sequences are also known in the art, for instance the BLAST family of programs (Altschul et al, J. Mol. Biol., 215:403410, (1990) and Altschul et al, Nuc Acids Res., 25:289-3402 (1997), available from the National Center for Biotechnology Information (NCB), Bethesda, Md., USA and accessible through the home page of the NCBI at www.ncbi.nlm.nih.gov) and FASTA (Pearson W. R. and Lipman D. J., Proc. Nat. Acac. Sci., USA, 85:2444-2448 (1988), available as part of the Wisconsin Sequence Analysis Package). Preferably, the BLOSUM62 amino acid substitution matrix (Henikoff S. and Henikoff J. G., Proc. Nat. Acad Sci., USA, 89:10915-10919, (1992)) is used in polypeptide sequence comparisons including where nucleotide sequences are first translated into amino acid sequences before comparison.

[0041] Preferably, the program BESTFIT is used to determine the % identity of a query polynucleotide or a polypeptide sequence with respect to a polynucleotide or a polypeptide sequence of the present invention, the query and the reference sequence being optimally aligned and the parameters of the program set at the default value.

[0042] In relation to the present invention, “stringent conditions” refers to the washing conditions used in a hybridisation protocol. In general, the washing conditions should be a combination of temperature and salt concentration so that the denaturation temperature is approximately 5 to 20° C. below the calculated Tₘ of the nucleic acid under study. The Tₘ of a nucleic acid probe of 20 bases or less is calculated under standard conditions (1M NaCi) as [4° C.×(G+C)+2° C.×(A+T)], according to Wallace rules for short oligonucleotides. For longer DNA fragments, the nearest neighbor method, which combines solid thermodynamics and experimental data may be used, according to the principles set out in Breslauer et al., PNAS 83: 3746-3750 (1986). The optimum salt and temperature conditions for hybridisation may be readily determined in preliminary experiments in which DNA samples immobilised on filters are hybridised to the probe of interest and then washed under conditions of different stringencies. While the conditions for PCR may differ from the standard conditions, the Tm may be used as a guide for the expected relative stability of the primers. For short primers of approximately 14 nucleotides, low annealing temperatures of around 44° C. to 50° C. are used. The temperature may be higher depending upon the base composition of the primer sequence used. Suitably stringent conditions are those under which non-specific hybridisation (e.g. to non-DPP10 encoding sequences) are avoided. Suitable stringent conditions are 0.5×SSC/1%SDS/58° C./30mins for a 21 mer oligonucleotide probe.

[0043] The complementary sequences of the invention (which may also be referred to herein as “antisense”) may be useful as probes or primers, or in the regulation of DPP10 expression. Preferably, the primer sequences are capable of amplifying all or a portion of a DPP10 gene. Preferred primer sequences are disclosed in the Examples. Pairs of primers for amplification of all or part of the gene, or alleles, or variants thereof, form another aspect of the invention. Similarly, DPP10 probes will be useful in detecting the presence or expression levels of DPP10, or variant forms thereof, in a sample from a subject. The probes may also be useful in analysing the expression pattern of DPP10 in a subject.

[0044] In the present application, fragments are any contiguous 10 residue sequence, or greater, such as 20, 30, 40, or 50 residue sequence. Preferably, fragments of nucleic acid or polypeptide sequences share one or more functional characteristics with DPP10 or its gene, or are capable of modulating (i.e. inhibiting or enhancing) such a functional characteristic. The novelty of a fragment according to the present embodiment may be easily ascertained by comparing the nucleotide or polypeptide sequence of the fragment with sequences catalogued in databases such as Genebank at the priority date, or by using computer programs such as DNASIS (Hitachi Engineering Inc) or Word Search or FASTA of the Genetic Computer Group (Madison, USA).

[0045] The fragments may be used in a variety of diagnostic, prognostic or therapeutic methods or may be useful as research tools for example in screening. Fragments of the sequences of the first aspect or their complements may be used as primer sequences as described above.

[0046] In a second aspect of the invention, the isolated nucleic acid sequences of the invention may be provided in the form of a vector to enable the in vitro or in vivo expression of DPP10. Vectors include plasmids, chromosomes, artificial chromosomes and viruses and may be expression vectors, which are capable of expressing nucleic acid sequences in vitro or in vivo, or transformation vectors which are capable of transferring the nucleic acid sequence from one environment to another. The nucleic acid molecules of the invention may be operably linked to one or more regulatory elements including a promoter.

[0047] The term regulatory elements includes response elements, consensus sites, methylation sites, locus control regions, post-transcriptional modifications, splice variants, homeoboxes, inducible factors, DNA binding domains, enhancer sequences, initiation codons, secretion signals and, polyA sequences. Regions upstream or downstream of a promoter such as enhancers, which regulate the activity of the promoter are also regulatory elements.

[0048] The vector may also comprise an origin of replication; appropriate restriction sites to enable cloning of inserts adjacent to the polynucleotide molecule; markers, for example antibiotic resistance genes; ribosome binding sites: RNA splice sites and transcription termination regions; polymerisation sites; or any other element, such a secretion signals, which may facilitate the cloning and or expression of the polynucleotide molecule.

[0049] Within a vector the gene may be expressed upstream or downstream of an expressed protein tag such as a histidine tag, V5 epitope tag, green fluorescent protein tag, MHC tag or other such tag known to those skilled in the art. Use of such a tag allows easy localisation, affinity purification and detection of the fusion protein with an antibody to the tag moiety.

[0050] Where two or more nucleic acid molecules of the invention are introduced into the same vector, each may be controlled by its own regulatory sequences, or all molecules may be controlled by the same regulatory sequence. In the same manner, each molecule may comprise a 3′ polyadenylation site. Examples of suitable vectors will be known to persons skilled in the art and include pBluescript II, lambdazap, and pCMV-Script (Stratagene Cloning Systems, La Jolla, USA).

[0051] Appropriate regulatory elements, in particular, promoters will usually depend upon the host cell into which the expression vector is to be inserted. Where microbial host cells are used, promoters such as lactose promoter system, tryptophan (Trp) promoter system, β-lactamase promoter system or phage lambda promoter system are suitable. Where yeast cells are used, preferred promoters include alcohol dehydrogenase I or glycolytic promoters. In mammalian host cells, preferred promoters are those derived from immunoglobulin genes, SV40, Adenovirus, Bovine Papilloma virus etc. Suitable promoters for use in various host cells would be readily apparent to a person skilled in the art (See, for example, Current Protocols in Molecular Biology Edited by Ausubel et al, published by Wiley). In addition, the regulatory elements may be modified, for example by the addition of further regulatory elements, to achieve a desired expression pattern.

[0052] By operably linked is meant that the components of the vector or sequence are in a relationship which allows them to function as intended.

[0053] These vectors may be used to transform host cells, for example, prokaryotic or eukaryotic cells. These cells may be used in the production of recombinant DPP10 gene products, or in the regulation or analysis of DPP10. The transformed host cells form part of the invention. Preferred cells include E. coli, yeast, filamentous fungi, insect cells, mammalian cells, preferably immortalised, such as mouse, CHO, HeLa, Myeloma or Jurkat cell lines, human and monkey cell lines and derivatives thereof

[0054] According to a third aspect of the invention, there is provided a polypeptide sequence comprising a polypeptide sequence encoded by a nucleic acid sequence of the first aspect of the invention. Preferably the polypeptide sequences are encoded by a nucleic acid sequence of FIGS. 2a, 4, 5, 5a, 6, 9 or 10.

[0055] The third aspect of the invention includes a polypeptide sequence comprising a polypeptide sequence as shown in any one of FIGS. 2a, 2c, 4, 5, 5a, 8, 9, 11, 12 or 21 or a sequence homologous thereto, or a fragment thereof. The sequences of FIGS. 2c, 4, 9, 11 and 12 are the predicted human DPP10 polypeptide sequences. The sequences of FIGS. 5, 5a and 8 are the predicted mouse DPP10 polypeptide sequences. FIG. 21 shows both mouse and human polypeptide sequences.

[0056] In a preferred embodiment of the third aspect there is provided a membrane bound form of DPP10 protein (FIG. 6, transcript 4; FIG. 4, FIG. 11). In particular the membrane bound form of DPP10 includes amino acids 35 to 56 of FIG. 11 which form the transmembrane domain (also FIG. 16). The mouse equivalents are transcripts 1, 2 and 3 (FIG. 7).

[0057] In a preferred embodiment of the third aspect, there is provided a soluble form of the DPP10 protein (Transcripts 2, 3, 5 and 6 of FIG. 6), which lacks a transmembrane domain or the catalytic domain (FIG. 14), or the beta-propeller domain (FIG. 17). In particular, the soluble DPP10 protein lacks amino acids 35 to 56 of FIG. 11, which form the transmembrane domain. In a most preferred embodiment, the soluble DPP10 protein comprises amino acids 57 to 751 or 796 of FIG. 11. The mouse equivalent is transcript 4 (FIG. 7).

[0058] The soluble DPP10 protein may be operably linked to a secretion signal, to assist its secretion from the golgi apparatus to another part of the cell. Suitable secretion signals can be provided by recombinant vectors such as pSecTag2 (Invitrogen Corporation, Carlsbad, Calif.). Proteins expressed from such vectors are fused at the N-terminus to the murine Ig kappa chain leader sequence. The secretion signal may be linked to the soluble DPP10 polypeptide sequence using techniques available in the art, including recombinant DNA technology.

[0059] The DPP10 protein or a sequence substantially homologous thereto of a fragment thereof may be subject to post-translational modification. Post-translational modification (PTM) is defined herein as including modification of a protein following translation by proteolytic cleavage e.g. cleavage of a preprotein, a proprotein or a preproprotein by removal of a signal sequence or activation of a zymogen. PTM also includes the attachment of a carbohydrate to a protein, the predominant sugars attached include glucose, galactose, mannose, fucose, GalNAC, GlcNAC and NANA. The carbohydrates may be linked to the protein either by β-glycosidic or N-glycosidic bonds. Also included are acylation; methylation; phosphorylation; sulfation and prenylation. Vitamin C-dependent modifications such as proline and lysive hydroxylation and carboxy terminal amidation and vitamin K-dependent modifications such as carboxylation of glutamine residues are also included as is the addition of selenium as selenocysterine in a protein.

[0060] The polypeptide sequences of the third aspect are preferably functional, and may be useful in drug screening, diagnosis or therapy. Functional. fragments of DPP10 are those which share immunological or functional characteristics with the full length, membrane bound or soluble form of DPP10. Fragments may be at least 10, preferably 15, 20, 25, 30, 35, 40 or 50 amino acids in length. Preferably, the polypeptide sequences are isolated.

[0061] In a fourth aspect of the present invention, there are provided antibodies which are specific for an antigen of a polypeptide sequence of the third aspect or an antigen of the isolated nucleic acid of the first aspect, or fragment of either aspect or which react with an antigen of a polypeptide sequence of the third aspect or the isolated nucleic acid of the first aspect, or fragment of either aspect. Herein the term “react” has the meaning that the antibody is able to interact with the polypeptide or isolated nucleic acid. The term “specific for” has the meaning that the antibody specifically reacts with the polypeptide or isolated nucleic acid.

[0062] Antibodies can be made by the procedure set forth by standard procedures (Harlow and Lane, “Antibodies; A Laboratory manual” Cold Spring Harbour Laboratory, Cold Spring Harbour, N.Y., 1998). Briefly, purified antigen can be injected into an animal in an amount and in intervals sufficient to elicit an immune response. Antibodies can either be purified directly, or spleen cells can be obtained from the animal. The cells are then fused with an immortal cell line and screened for antibody secretion. The antibodies can be used to screen DNA clone libraries for cells secreting the antigen. Those positive clones can then be sequenced as described in, for example, Kelly et al., Bio/Technology 10: 163-167 (1992) and Bebbington et al., Bio/Technology 10:169-175 (1992). Preferably, the antigen being detected and/or used to generate a particular antibody will include polypeptide sequences according to the third aspect or isolated nucleic acid sequences according to the first aspect. The antibody may be a polyclonal or monoclonal antibody, a chimeric antibody, a humanised antibody or a bifunctional antibody or a fragment of any of the above. A bifunctional antibody is an antibody that can bind to two different antigens, these antigens may be different antigens present in the DPP10 polypeptide or isolated nucleic acid or may be an antigen of DPP10 combined with e.g. a cellular antigen.

[0063] In particular, the antibody may be raised against a particular domain of DPP10, such as the cytosolic soluble form; the β-propeller domain, or the external domain. Such antibodies will be useful in diagnostic and therapeutic aspects of the invention. In particular, the antibodies will be useful in the development of assays for detecting or measuring DPP10 in a sample from a subject.

[0064] In a preferred embodiment, the antibody may be used to assay the level of cytosolic, soluble DPP10 protein in a serum sample obtained from a subject (FIG. 27). According to a fifth aspect of the invention, there is provided a process for the preparation of a nucleic acid sequence as defined above, the process comprising ligating together successive nucleotide and/or oligonucleotide residues together. Such a process may be carried out using chemical synthesis methods or by using enzymic catalysis. Alternatively, a suitable host cell may be transfected with an appropriate DNA or RNA sequence so as to cause production of the desired sequence in a host cell.

[0065] In a sixth aspect of the invention, there is provided a process for the preparation of a polypeptide as defined above, the process comprising ligating together successive amino acids and/or oligonucleotides together. Such a process may be carried out using chemical synthesis methods or by using enzymic catalysis. Alternatively, a suitable host cell may be transfected with an appropriate DNA or RNA sequence so as to cause production of the desired sequence in a host cell.

[0066] In the context of the present invention, references to DPP10 include the soluble, membrane bound or insoluble forms of the protein, which comprise at least the polypeptide sequence encoded by exons 2 to 25. Thus, references to DPP10 include proteins encoded by transcripts having one or more of exons 1a, 1b, 1c, 1d, 1e, 1f or 1g.

[0067] In a seventh aspect of the present invention, there is provided the following; a cell comprising a nucleic acid sequence according to an aforementioned aspect of the invention; or a transgenic non-human animal comprising a nucleic acid sequence according to an aforementioned aspect of the invention. Such cells (either alone, in suspension, in culture or as part of a group of cells representing an organ) and transgenic non-human animals are useful for the analysis of a single nucleotide polymorphisms and their phenotypic effect and so for the analysis of DPP10 and its phenotypic effect. Expression of a polynucleotide sequence of the invention in a transgenic non-human animal is usually achieved by operably linking the polynucleotide to a promoter and/or enhancer sequence, preferably to produce a vector of the above aspect, and introducing this into an embryonic stem cell of a host animal by microinjection techniques (Hogan et al., A Laboratory Manual., Cold Spring harbour and Capecchi Science (1989) 244: 1288-1292). The transgene construct should then undergo homologous recombination with the endogenous gene of the host. Those embryonic stem cells comprising the desired nucleic acid sequence may be selected, usually by monitoring expression of a marker gene, and used to generate a non-human transgenic animal. Preferred host animals include mice, rabbits and other rodents.

[0068] The nucleic acid sequence introduced may not be native to the host animal, i.e. it may be foreign. Such transgenic animals may be distinguished from native, non-transgenic animals using methods known in the art, for example a nucleic acid sample from the transgenic animal may be compared with that from a native animal—the transgenic animal will have a nucleic acid sequence such as a foreign promoter, marker genes etc. Alternatively, the phenotypes of the animals can be compared.

[0069] Where it is desirable to use the transgenic non-human animal of the seventh aspect to study disease, it may be desirable for the nucleic acid introduced into the animal to encode a variant of DPPIO which results in allergy, atopy, asthma or inflammatory disease including rheumatoid arthritis, ankylosing spondylitis, inflammatory bowel disease, Crohn's disease, multiple sclerosis or type II diabetes. In such embodiments where the disease has been artificially introduced, the transgenic non-human animal will be modulated such that it no longer expresses the native DPP10 gene. These animals may be referred to as “knock-out” (Manipulating The Mouse Embryo—A Laboratory Manual, Hogan et al 1986). In some cases, it may be desirable to modulate the expression of the foreign nucleic acid and/or the native gene in a temporal or spatial manner. This approach removes viability problems if the expression of the native gene is abolished in all tissues.

[0070] In a most preferred embodiment, there is provided a transgenic mouse comprising a nucleic acid encoding a variant form of DPP10 which causes allergy, atopy, asthma or inflammatory disease including rheumatoid artitis, ankylosing spondylitis, inflammatory bowel disease, Crohn's disease, multiple sclerosis or type II diabetes. Most preferably, the nucleic acid molecule comprises a SNP at the position which corresponds to Position 259007 (where the base adenine is changed to cytosine), Position 267901 (where the base adenine is changed to guanine) and/or Position 318524 (where the base thymine is changed to cytosine) of FIG. 1. Preferably, the mouse is modulated so that it no longer expresses DPP10 in a temporally and/or spatially appropriate manner using homologous recombination techniques or alternatively to over express DPPlO protein as a result of transgenic manipulation.

[0071] If a functional, polymorphism is identified (i.e. a “mutation”) a DPP10 construct containing this polymorphism can be introduced into the mouse germ line (i.e. a knock-in) to produce a pathological variant of the DPP10 protein rather than knocking it out. Alternatively a pathological variant of the DPP10 gene may be overexpressed.

[0072] In the context of the present invention, inflammatory diseases include those resulting from overexpression of DPP10, or the presence of a variant form of DPP10. Specifically, such diseases include allergies, and atopic diseases such as asthma, or inflammatory bowel disease e.g. ulcerative colitis and Crohn's disease, and inflammatory joint disease such as rheumatoid arthritis and ankylosing spondylitis, or psoriasis, multiple sclerosis or type II diabetes.

[0073] In an eighth aspect of the present invention, there is provided a method of diagnosing, or determining susceptibility of a subject to inflammatory disease. The method may comprise determining the presence of a variant form of DPP10, which is known to be associated with a disease state, or measuring the levels of DPP10. A variant form of DPP10 includes nucleic acid and amino acid variants. A variant includes any SNP from the wild-type (e.g. for humans) (FIG. 1) or other mutation or alteration from the wild-type.

[0074] For example, probes or primers as described above may be useful in detecting nucleic acid encoding DPP10 or a variant thereof Information regarding the expression pattern or forms of DPP10 present will be useful in determining whether the individual is susceptible to inflammatory diseases, resulting from altered expression of DPP10; possibly by influencing the ratio of membrane bound to cytosolic forms of the DPP10 protein.

[0075] In a preferred embodiment, the method may additionally, or alternatively, comprise determining the presence or absence of a risk allele of one or more of the SNPs of Tables 1a, 1b and 1c or Table 3, where presence of a risk allele is indicative of disease or predisposition to disease. The method may also comprise genotyping one or more known polymorphisms. Any combination of such polymorphisms may be genotyped.

[0076] The SNPs of the invention are listed in Tables 1a, 1b and 1c or Table 3, where the nature of the polymorphism is described in the format wild type allele/variant allele. For example, the SNP at position 21818 (denoted 69WTC50W) has an adenosine residue in the wild type sequence, which is substituted for a guanine residue in the variant sequence. The SNPs are positioned with respect to FIG. 1, where nucleotide position 1 is the 1^{st} nucleotide in the FIG. 1.

[0077] Preferably, the allele of the SNP polymorphisms are as follows: a nucleotide residue other than adenine at position 259007; a nucleotide residue other than adenine at position 267901; and a nucleotide residue other than thymine at position 318524 of FIG. 1. More specifically, the risk allele are a cytosine residue at position 259007; a guanine residue at position 267901; and a cytosine residue at position 318524 of FIG. 1.

[0078] The alleles for the remaining SNPs identified in the present invention are described in Tables 1a, 1b and 1c or Table 3.

[0079] Any technique, including those known to persons skilled in the art, may be used in the above method. These may include the use of probes or primers as described above, or antibodies of the fourth aspect, for example in ELISA assays or in immuno-localisation. Preferably, the method comprises first removing a sample from a subject. More preferably, the method comprises isolating from a sample a nucleic acid or a polypeptide sequence.

[0080] In particular, methods for use in this aspect include those known to persons skilled in the art for identifying differences between nucleic acid sequences, for example direct probing, allele specific hybridisation, PCR methodology including Pyrosequencing (Ahmadian A, Gharizadeh B, Gustafsson AC, Sterky F, Nyren P, Uhlen M, Lundeberg J. Single-nucleotide polymorphism analysis by pyrosequencing, Anal Biochem. 2000 Apr 10;280(l):103-10; Nordstrom T, Ronaghi M, Forsberg L, de Faire U, Morgenstern R, Nyren P. Direct analysis of single-nucleotide polymorphism on double-stranded DNA by pyrosequencing. Biotechnol Appl Biochem. 2000 Apr,31 (Pt 2):107-12) Allele Specific Amplification (ASA) (W093/22456), Allele Specific Hybridisation, single base extension (US patent No. 4,656,127), ARMS-PCR, Taqman TM (US 4683202; 4683195; and 4965188), oligo ligation assays, single-strand conformational analysis ((SSCP) Orita et al PNAS 86 2766-2770 (1989)), Genetic Bit Analysis (WO 92115712) and RFLP direct sequencing, mass-spectrometry (MALDI-TOF) and DNA arrays. The appropriate restriction enzyme, will, of course, be dependent upon the polymorphism and restriction site, and will include those known to persons skilled in the art. Analysis of the digested fragments may be performed using any method in the art, for example gel analysis, or southern blots.

[0081] There is provided a method of diagnosing, or determining predisposition to disease, comprising determining the presence or absence of a risk allele of a SNP at position 259007 of FIG. 1, wherein presence of the risk allele is diagnostic of disease or predisposition of disease.

[0082] In addition, there is provided a method for diagnosing, or determining predisposition to, disease comprising determining the presence or absence of risk alleles of a SNP at positions 267901 and/or 318524 of FIG. 1, wherein presence of a risk allele is diagnostic of disease or predisposition to disease.

[0083] The present invention is advantageous in that it facilitates the accurate diagnosis of disease, or the determination of predisposition to disease. Thus, by genotyping, an individual may be identified as having or being predisposed to disease. This helps to identify those individuals who are likely to respond positively to particular treatments or preventative measures. Thus, more effective therapies or preventative measures can be administered.

[0084] The diseases which are associated with the polymorphisms of the invention include inflammatory diseases, such as inflammatory bowel disease, e.g. ulcerative colitis and Crohn's disease, and inflammatory joint disease, such as rheumatoid arthritis and ankylosing spondylitis, or multiple sclerosis or type II diabetes. Predisposition to disease in the context of the present invention means that. these individuals are at higher risk of developing the disease, or a more severe form of the disease, or a particular form of the disease.

[0085] In the context of the present invention, a risk allele is the allele of a polymorphism which is associated with disease or predisposition to disease. The risk allele may be the wild type or the variant allele, as defined below.

[0086] The term “polymorphism” refers to the coexistence of multiple forms of a sequence. Thus, a polymorphic site is the location at which sequence divergence occurs. The different forms of the sequence which exist as a result of the presence of a polymorphism are referred to as “alleles”. The region comprising a polymorphic site may be referred to as a polymorphic region.

[0087] Examples of the ways in which polymorphisms are manifested include restriction fragment length polymorphisms (13otstein et al Am J Hum Genet 32 314331 (1980)), variable number of tandem repeats, hypervariable regions, minisatellites, di- or multi-nucleotide repeats, insertion elements and nucleotide or amino acid deletions, additions or substitutions. A polymorphic site may be as small as one base pair, which may alter a codon thus resulting in a change in the encoded amino acid sequence.

[0088] Single nucleotide polymorphisms arise due to the substitution, deletion or insertion of a nucleotide residue at a polymorphic site. Such variations are referred to as SNPs. SNPs may occur in protein coding regions, in which case different polymorphic forms of the sequence may give rise to variant protein sequences. Other SNPs may occur in non-coding regions. In either case, SNPs may result in defective proteins or regulation of genes, thus resulting in disease. Other SNPs may have no phenotypic effects, but may show linkage to disease states, thus serving as markers for disease. SNPs typically occur more frequently throughout the genome than other forms of polymorphism discussed above, and there is therefore a greater probability of finding a SNP associated with a particular disease state.

[0089] Linkage disequilibrium is the coinheritance of two alleles at greater frequencies than would be expected from the separate frequencies of each allele. Conversely, alleles are in linkage equilibrium if they occur together. The expected frequency of two alleles inherited together is the product of the frequency of each allele.

[0090] Where two or more polymorphisms are genotyped, the method preferably defines determining the presence or absence of a haplotype which is indicative of disease or predisposition to disease. A haplotype is defined herein as a collection of polymorphic sites in a particular sequence that are inherited in a group, i.e. are in linkage disequilibrium with each other. The identification of haplotypes in the diagnosis of disease helps to reduce the possibility of false positives. The haplotype may be any particular combination of polymorphisms of Tables 1a, 1b and 1c or Table 3, optionally in combination with one or more known polymorphisms. A preferred haplotype is the combination of SNPs at positions 259007, 267901 and 318524 of FIG. 1.

[0091] The methods of the eighth aspect are preferably carried out on a sample removed from a subject. Any biological sample comprising cells containing nucleic acid, preferably that of FIG. 1, is suitable for this purpose. Examples of suitable samples include whole blood, leukocytes, semen, saliva, tears, buccal, skin or hair. For analysis of CDNA, mRNA or protein, the sample must come from a tissue in which the sequence of interest is expressed. Blood is a readily accessible sample. Thus, the method of the eighth aspect preferably includes the steps of obtaining a sample from a subject, and preparing nucleic acid from the sample.

[0092] The subject is preferably a mammal, and more preferably a human. The subject may be an infant, a child or an adult. Alternatively, the sample may be obtained from the subject prepartum e.g. by amniocentesis.

[0093] A subject's risk factor for disease may be determined with reference also to other known genetic factors, and/or clinical, physiological or dietary factors. The above described methods may require amplification of the DNA sample from the subject, and this can be done by techniques known in the art, such as PCR (see PCR Technology: Principles and Applications for DNA Amplification (ed. H. A. Erlich, Freeman Press, N.Y. 1992; PCR Protocols: A Guide to methods and Applications (eds. Innis et al., Academic press, San Diego, Calif. 1990); Mattila et al., Nucleic Acids Res. 19 4967 (1991); Eckert et al., PCR Metlods and Applications 117 (1991) and U.S. Pat. No 4,683,202. Other suitable amplification methods include ligase chain reaction (LCR) (Wu et al., Genomics 4 560 (1989); Landegran et al., Science 241 1077 (1988)), transcription amplification (Kwoh et al., Proc Natl Acad Sci USA 86 1173 (1989)), self sustained sequence replication (Guatelli et al., Proc Natl Acad Sci USA 87 1874 (1990)) and nucleic acid based sequence amplification (NASBA). The latter two methods both involve isothermal reactions based on isothermal transcription which produce both single stranded RNA and double stranded DNA as the amplification products, in a ratio of 30 or 100 to 1, respectively.

[0094] Where it is desirable to analyse multiple samples simultaneously, it may be preferable to use arrays as described in WO95/11995. The array may contain a number of probes, each designed to identify variants of DPP10 from a sample.

[0095] Where a restriction enzyme is required, it can be selected according to the nature of the polymorphism and restriction site. Suitable enzymes will be known to persons skilled in the art. Analysis of the digested fragments may be performed using any method in the art, for example gel analysis, or southern blots.

[0096] Determination of an allele of a polymorphism using the above methods typically involves the use of anti-sense sequences i.e. sequences which are complementary to the nucleic acid sequences of interest, which may include part of the sequence of FIG. 1. Such sequence are described in the third aspect of the invention.

[0097] Where it is desirable to identify the presence of multiple single nucleotide polymorphisms, or haplotypes, in a sample from a subject, it may be preferable to use arrays as described in WO95/11995. The array may contain a number of probes, each designed to identify one or more of the above single nucleotide polymorphisms of the invention.

[0098] An antibody to DPP10 as previously described may be used in the method of the eighth aspect. The detection of binding of the antibody to the antigen in a sample may be assisted by methods known in the art, such as the use of a secondary antibody which binds to the first antibody, or a ligand. Immunoassays including immunofluorescence assays (IFA) and enzyme linked immunosorbent assays (ELISA) and immunoblotting may be used to detect the presence of the antigen. For example, where ELISA is used, the method may comprise binding the antibody to a substrate, contacting the bound antibody with the sample containing the antigen, contacting the above with a second antibody bound to a detectable moiety (typically an enzyme such as horse radish peroxidase or alkaline phosphatase), contacting the above with a substrate for the enzyme, and finally observing the colour change which is indicative of the presence of the antigen in the sample.

[0099] Any biological sample comprising cells containing nucleic acid or protein is suitable for this purpose. Examples of suitable samples include whole blood, semen, saliva, tears, buccal, skin or hair. For analysis of cDNA, mRNA or protein, the sample must come from a tissue in which DPP10 is expressed. Peripheral blood leukocytes are a readily accessible sample.

[0100] According to a ninth aspect of the invention, there is provided a method of preventing or treating disease in a subject, wherein the method comprises modulating the activity, expression, half life or post translational modification of DPP10 in the subject. Preferably, the method is carried out in a subject who has been diagnosed as suffering from, or is susceptible to allergies, atopic diseases such as asthma or inflammatory bowel disease e.g. ulcerative colitis and Crohn's disease, and inflammatory joint disease such as rheumatoid arthritis and ankylosing spondylitis, or psoriasis, multiple sclerosis or type II diabetes

[0101] Preferably, the method comprise determining the presence or absence of a risk allele of a SNP such as one which has an association with allergy, atopy, asthma or inflammatory disease e.g. at position 259007, 267901 and/or 318524 of FIG. 1; and if the risk allele is present, administering treatment in order to prevent, delay or reduce the disease.

[0102] Preferably, the step of comprising determining the presence or absence of a risk allele is carried out in accordance with the eighth aspect, and therefore also comprises determining the presence or absence of risk alleles of SNPs of Tables 1a, 1b and 1c or Table 3, or any combination thereof, for example as described above.

[0103] The prevention or treatment of disease according to the ninth aspect may include the administration of any agent capable of modulating the effects of DPP10 or of the disease-causing allele. Preferably, the agent is one which is capable of ameliorating the deleterious effects of the risk allele. The methods include, but are not limited to, gene therapy techniques. Gene therapy techniques typically involve replacing the nucleic acid sequence comprising the risk allele, or otherwise down regulating the effects of the risk allele. The nucleic acid sequences of the second aspect, or sequences anti-sense thereto, will be useful in gene therapy.

[0104] By modulating is meant inhibiting or increasing the activity of the enzyme. Preferably, the activity is inhibited. The activity of the enzyme includes any aspect of its production or function, including transcription and translation of nucleic acid sequences, and assembly of the protein, and downstream interactions with other factors.

[0105] The DPP10 activity can be modulated in a number of ways. For example, the expression of the gene may be inhibited through the use of antisense sequences, such as those of the first aspect of the invention or by the production of anti sense RNA sequences. Such sequences when introduced into a subject by gene therapy will hybridise to the DPP10 gene or RNA, and inhibit its transcription or translation. This method may be particularly useful where it is desirable to modulate the function or expression of certain splice variants of DPP10 whilst not affecting others.

[0106] Introduction of a nucleic acid sequence may use gene therapy methods including those known in the art. In general, a nucleic acid sequence will be introduced into the target cells of a subject, usually in the form of a vector and preferably in the form of a pharmaceutically acceptable carrier. Any suitable delivery vehicle may be used, including viral vectors, such as retroviral vector systems which can package a recombinant genome. The retrovirus could then be used to infect and deliver the polynucleotide to the target cells. Other delivery techniques are also widely available, including the use of adenoviral vectors, adeno-associated vectors, lentiviral vectors, pseudotyped retroviral vectors and pox or vaccinia virus vectors. liposomes may also be used, including commercially available liposome preparations such as lipofectin ®, Lipofectamine ®, (GIBCO-BRL, Inc. Gaitherburg, Md.), Superfect ® (Qiagen Inc, Hilden, Germany) and Transfectam ® (Promega Biotec Inc, Madison Wis.). Other means to modulate a biological activity of DPP10 include agents which may affect interaction of DPP10 with downstream factors with which it interacts. For example, the activity of DPP10 may be affected. by inhibiting its interaction, with molecules containing the XPXS motif such as chemokines and cytokines, e.g. those shown in FIG. 19. In particular, the activity of DPP1O may be inhibited by the use of competitive or non-competitive inhibitors of any one or more of these chemokines or cytokines, or by small molecule inhibitors, which may function by inhibiting the active triad of DPP10. Other methods of inhibition will be known to persons skilled in the art.

[0107] Also provided is an agent, for use in the prevention or treatment of inflammatory disease in a subject, as defined above. Agents include nucleic acid sequences of the first or second aspects, polypeptide sequences of the third aspect, antibodies of the fourth aspect, and any other agent defined herein, preferably those which are capable of modulating the activity of DPP10.

[0108] The subject may be any animal, preferably a mammal, and more preferably human.

[0109] Also provided is the use of an agent as defined above in the manufacture of a medicament for use in the prevention or treatment of inflammatory disease, as defined above, in a subject.

[0110] In a tenth aspect of the invention there is provided isolated nucleic acid molecules comprising part of the sequence of FIG. 1, and comprising one or more SNPs at positions which correspond to the positions of FIG. 1 listed in any one or more Tables 1a, 1b, 1c or 3.

[0111] Particular isolated nucleic acid molecules include those:
[0112] comprising a SNP at the position corresponding to position 259007 of FIG. 1 where the adenine is changed to cytosine.
[0113] comprising a SNP at the position corresponding to position 267901 of FIG. 1 where the adenine is changed to guanine.
[0114] comprising a SNP at the position corresponding to position 318524 of FIG. 1 where the thymine is changed to cytosine.

[0115] The nucleic acid molecules of the invention may be DNA, RNA, and single or double stranded sequences. All the molecules of the present invention are isolated, or alternatively may be recombinant. By isolated is meant a nucleic acid molecule which has been purified, and is substantially free of protein and other nucleic acid. Such molecules may be obtained by PCR amplification, cloning techniques, or synthesis on a synthesiser. By recombinant is meant nucleic acid molecules which have been recombined by the hand of man.
[0116] The isolated nucleic acid molecules of the present invention are different to the “wild type” or “reference” sequence of FIG. 1. The sequence of FIG. 1, a 465 Kb region surrounding the D2S308 marker, described in WO99/50451 as being associated with asthma, is derived from a BAC/PAC contig which is not part of the invention. The BACs in the contig are 416L5, 543L9 and 317L18. The PAC is 69CE4 is not part of the invention. The nucleic acid sequences of the invention which differ from the sequence of FIG. 1 at any one or more of the positions detailed in Tables 1a, 1b, 1c or 3 are referred to as polymorphic variants of the sequence of FIG. 1 and form part of the invention.

[0117] This aspect of the invention also provides antisense sequences. Such sequences are typically single stranded and are capable of hybridizing to the above mentioned nucleic acid sequences of the invention, or to the sequence of FIG. 1, under stringent conditions. Preferred antisense sequences are those which are capable of hybridising to an allele of a polymorphism of the invention, and most preferably is capable of distinguishing between alleles of a polymorphism (of Tables 1a, 1b, 1c or 3). Stringent conditions are defined below. The antisense sequences may be prepared synthetically or by nick translation, and are preferably isolated or recombinant.

[0118] The antisense sequences include primers and probes, for example for use in the methods of the present invention. Primer sequences are capable of acting as an initiation site for template directed nucleic acid synthesis, under appropriate conditions which will be known to skilled persons. Probes are useful in the detection, identification and isolation of particular nucleic acid sequences. Probes and primers are preferably 15 to 30′nucleotides in length.

[0119] For amplification purposes, pairs and primers are provided. These include a 5′ primer which hybridizes to the 5′ end of the nucleic acid sequence to be amplified, and a 3′ primer which hybridizes to the complementary strand of the 3′ end of the nucleic acid to be amplified. Preferred primers are those listed in Table 2.

[0120] Probes and primers may be labelled, for example to enable their detection. Suitable labels include for example, a radiolabel, enzyme label, fluoro-label, biotin-avidin label for subsequent visualization in, for example, a southern blot procedure. A labelled probe or primer may be reacted with a sample DNA or RNA, and the areas of the DNA or RNA which carry complimentary sequences will hybridise to the probe, and become labelled themselves. The labelled areas may be visualized, for example by autoradiography.

[0121] Preferably, the probes and/or primers hybridise under, “stringent conditions”, which refers to the washing conditions used in a hybridisation protocol. The hybridisation conditions for probes are preferably sufficiently stringent to allow distinction between different alleles of a polymorphism upon binding of the probes. In general, the washing conditions should be combination of temperature and salt concentration so that the denaturation temperature is approximately 5 to 20° C. below the calculated Tₘ of the nucleic acid under study. The Tₘ of a nucleic acid probe of 20 bases or less is calculated under standard conditions (1M NaCl) as [4° C.×(G+C)+2° C.×(A+T)], according to Wallace rules for short oligonucleotides. For longer DNA fragments, the nearest neighbor method, which combines solid thermodynamics and experimental data may be used, according to the principles set out in Breslauer et al., PNAS 83: 3746-3750 (1986). The optimum salt -and temperature conditions for hybridisation may be readily determined in preliminary experiments in which DNA samples immobilised on filters are hybridised to the probe of interest and then washed under conditions of different stringencies. While the conditions for PCR may differ from the standard conditions, theTm may be used as a guide for the expected relative stability of the primers. For short primers of approximately 14 nucleotides, low annealing temperatures of around 44° C. to 50° C. are used. The temperature may be higher depending upon the base composition of the primer sequence used. Typically, the salt concentration is no more than 1M, and the temperature is at least 25° C. Suitable conditions are 5×SSPE (750 mM NaCl, 50 mM NaPhosphate, 5 mM EDTA pH 7.4) and a temperature of 25-30° C.

[0122] In an eleventh aspect, there is provided a host cell comprising a vector or isolated nucleic acid molecule according to the aforementioned aspects. The host cell may comprise an expression vector, or naked DNA encoding the nucleic acid molecules of the invention. A wide variety of suitable host cells are available, both eukaryotic and prokaryotic. Examples include bacteria such as E. coli, yeast, filamentous fungi, insect cells, mammalian cells, preferably immortalised, such as mouse, CHO, HeLa, myeloma or Jurkat cell lines, human and monkey cell lines and derivatives thereof. The host cells are preferably capable of expression of the nucleic acid sequence to produce a gene product (i.e. RNA or protein). Such host cells are useful in drug screening systems to identify agents for use in diagnosis or treatment of individuals having, or being susceptible to inflammatory disease as defined above.

[0123] The method by which said nucleic acid molecules are introduced into a host cell will usually depend upon the nature of both the vector/DNA and the target cell, and will include those known to a person skilled in the art. Suitable known methods include but are not limited to fusion, conjugation, liposomes, imrnmunoliposomes, lipofectin, transfection, transduction, eletroporation or injection, as described in Sambrook et al.

[0124] In a twelfth aspect of the invention there is provided a kit for diagnosis of disease or predisposition to disease, comprising a means for determining the presence or absence of a risk allele of a SNP of Tables 1a, 1b, 1c or 3, wherein the risk allele is diagnostic of disease or of predisposition to disease.

[0125] In a preferred embodiment, the kit comprises a means for determining the presence or absence of one or more risk alleles of polymorphisms according to the eighth aspect. In particular, the kit comprises means for determining the presence or absence of a risk allele of a SNP at position 259007, position 267901, and/or position 318524 of FIG. 1.

[0126] Preferably the kit will comprise the components necessary to deterrnine the presence or absence of a risk allele, in accordance with the eighth aspect of the invention. Such components include PCR primers and/or probes, for example those described above, PCR enzymes, restriction enzymes, and DNA or RNA purification means. Preferably, the kit will contain at least one pair of primers, or probes, preferably as described above in accordance with the tenth aspect of the invention. The primers are preferably allele specific primers. Other components include labeling means, buffers for the reactions. In addition, a control nucleic acid sample may be included, which comprises a wild type or variant nucleic acid sequence as defined above, or a PCR product of the same. The kit will usually also comprise instructions for carrying out the diagnostic method, and a key detailing the correlation between the results and the likelihood of disease. The kit may also comprise an agent for the prevention or treatment of disease.

[0127] In a thirteenth aspect of the invention, there is provided a method of identifying a compound for treatment of disease, comprising (a) administration of a compound to tissue comprising an isolated nucleic acid molecule comprising a SNP at a position which corresponds to a position of FIG. 1 listed in Tables 1a, 1b, 1c or 3; and (b) determining whether the agent modulates effects of the SNP.

[0128] In a preferred embodiment, the isolated nucleic acid molecule is according to the tenth aspect of the invention, and most preferably comprises a SNP at a position corresponding to position 259007, position 267901, and/or position 318524 of FIG. 1.

[0129] In this aspect, a nucleic acid molecule of the invention, and/or a cell line according to an aforementioned aspect, may be used to screen for agents which are capable of modulating the effect of a SNP.

[0130] Potential agents are those which react differently with a risk allele and non-risk allele. Putative agents will include those known to persons skilled in the art, and include chemical or biological compounds, sense or anti-sense nucleic acid sequence for example as described above, binding proteins, kinases, and any other gene or gene product agonist or antagonist. Preferably, the agent will be capable of modulating the effects of the disease causing allele. Most preferably, the agent is one which is capable of ameliorating the deleterious effects of the risk allele.

[0131] Such agents may be suitable for either prophylactic administration or after a disease has been diagnosed. The route of administration is suitably chosen according to the disease or condition to be treated, however, typical routes of administration of the agent of the present invention include but are not limited to oral, rectal, intravenous, parenteral, intramuscular and sub-cutaneous routes. The invention also provides for agents to be administered either as DNA or RNA and thus as a form of gene therapy. The agents may be delivered into cells directly by means including but not limited to liposomes, viral vectors and coated particles (gene gun).

[0132] In a fourteenth aspect of the present invention there is provided an agent or antibody as described above according to the invention, or use in preventing or treating allergies, and atopic diseases such as asthma or inflammatory bowel disease e.g. ulcerative colitis and Crohm's disease, and inflammatory joint disease such as rheumatoid arthritis and ankylosing spondylitis, or psoriasis, multiple sclerosis or type II diabetes.

[0133] There is also provided the use of an agent or antibody as described above in the manufacture of a medicament for use in the prevention or treatment of allergies, and atopic diseases such as asthma or inflammatory bowel disease e.g. ulcerative colitis and Crohn's disease, and inflammatory joint disease such as rheumatoid arthritis and ankylosing spondylitis, or psoriasis, multiple sclerosis or type II diabetes.

[0134] According to a fifteenth aspect of the invention, there is provided, a pharmaceutical composition comprising a nucleic acid or polypeptide sequence as defined above according to the invention. Alternatively, the pharmaceutical composition may comprise an agent as defined in relation to the above aspect or an antibody according to the fourth aspect of the invention.

[0135] Administration of pharmaceutical compositions is accomplished by any effective route, e.g. orally or parenterally. Methods of parental delivery include topical, intra-arterial, subcutaneous, intramedullary, intravenous, or intranasal administration. Administration can also be effected by amniocentesis-related techniques. Oral administration followed by subcutaneous injection would be the preferred routes of uptake; also long acting immobilisations would be used. In addition to the active ingredients, these pharmaceutical compositions may contain suitable pharmaceutically acceptable carriers comprising excipients and other compounds that facilitate processing of the active compounds into preparations which can be used pharmaceutically. Further details on techniques for formulation and administration rnay be found in the latest edition of REMINGTON'S PHARMACEUTICAL SCIENCES” (Maack Publishing Co, Easton Pa.).

[0136] Pharmaceutical compositions for oral administration can be formulated using pharmaceutically acceptable carriers well known in the art, in dosages suitable for oral administration. Such carriers enable the pharmaceutical compositions to be formulated as tablets, pills, dragees, capsules, liquids, gels, syrups, slurries, suspensions, etc., suitable for ingestion by the patient.

[0137] Pharmaceutical compositions suitable for use in the present invention include compositions wherein the active ingredients are contained in an effective amount to achieve the intended purpose. Thus, a therapeutically effective amount is an amount sufficient to ameliorate or eradicate the symptoms of the disease being treated. The amount actually administered will be dependent upon the individual to which treatment is to be applied, and will preferably be an optimised amount such that the desired effect is achieved without significant side-effects. The determination of a therapeutically effective dose is well within the capability of those sldlled in the art. Of course, the skilled person will realise that divided and partial doses are also within the scope of the invention.

[0138] For any compound, the therapeutically effective dose can be estimated initially either in cell culture assays or in any appropriate animal model. These assays should take into account receptor activity as well as downstream processing activity. The animal model is also used to achieve a desirable concentration range and route of administration. Such information can then be used to determine useful doses and routes for administration in humans.

[0139] A therapeutically effective amount refers to that amount of agent, which ameliorates the symptoms or condition. Therapeutic efficacy and toxicity of such compounds can be determined by standard pharmaceutical procedures, in cell cultures or experimental animals (e.g. ED50, the dose therapeutically effective in 50% of the population; and LD50 the dose lethal to 50% of the population). The dose ratio between therapeutic and toxic effects is the therapeutic index, and it can be expressed as the ratio ED₅₀/LD₅₀. Pharmaceutical compositions, which exhibit large therapeutic indices, are preferred. The data obtained from cell culture assays and animal studies is used in formulating a range of dosage for human use. The dosage of such compounds lies preferably within a range of circulating concentrations that include the ED₅₀ with little or no toxicity. The dosage varies within this range depending upon the dosage form employed, sensitivity of the patient, and the route of administration.

[0140] The exact dosage is chosen by the individual physician in view of the patient to be treated. Dosage and administration are adjusted to provide sufficient levels of the active moiety or to maintain the desired effect. Additional factors, which may be taken into account, include the severity of the disease state. Long acting pharmaceutical compositions might be administered every 3 to 4 days, every week, or once every two weeks depending on half-life and clearance rate of the particular formulation. Guidance as to particular dosages and methods of delivery is provided in the literature (see, U.S. Pat. No's 4,657,760; 5,206,344 and 5,225,212 herein incorporated by reference).

[0141] According to a sixteenth aspect of the invention, there is provided a number of screens. A first screen provides for identifying an agent which modulates DPP10 activity comprising:
[0142] providing a polypeptide sequence as claimed in any one of claims 8 to 13;
[0143] providing a DPP10 substrate;.
[0144] providing an agent to be tested;
[0145] measuring whether the agent to be tested modulates DPP10 by measuring processing of the DPP10 substrate.

[0146] The components of the screen are combined, in any optional order.

[0147] In the screening assay the DPP10 may be any DPP10 as claimed in any one of claims 8 to 13. Fragments of the DPP10 molecule such as the propeller domain, the fibronectin binding domain or another extracellular matrix binding domains may be used. Also, DPP10 polypeptides which comprise one or more SNP nucleic acid sequences of the present invention, such as described in any one of claims 37 to 41 may be used. The DPP10 polypeptide may be purified or non-purified. The DPP10 polypeptide may be soluble. It may comprise one or more of the domains.

[0148] The agent being tested is being identified for use in the prevention or treatment of a DPP10 related or mediated disease or disorder. Such diseases or disorders include: asthma, eczema or hayfever (known as atopic diseases), inflammatory bowel disease (e.g ulcerative colitis or Crohn's disease), inflammatory joint diseases (such as rheumatoid arthritis and ankylosing spondylitis), psoriasis, brain diseases involving an inflammatory component such as multiple sclerosis or type II diabetes or hypertension.

[0149] The DPP10 substrate may be any which is processed by a DPP10 polypeptide of the invention. By processed is meant any changes which can be measured. The substrate may comprise the formula XPXS or more specifically the formula NH₂X—P(X)_{y}S(X)ₙ where NH₂ is the amino terminus, X is any amino acid, P is proline, S is serine, y is 1 to 4, and n is any number. The substrate may be a cytoidne containing the XPXS motif such as those in FIG. 19, namely RANTES, SDF-1, EOTAXN, IP10, MCP2, IL17 β, IL2, GCP-2, IL18bp, chemokine CC-1/CC-3, interleukin-8, CTAK/ALP/LIC, or a small peptide having such a motif. These substrates may be fluorescently labelled or modified to allow easy detection of processing. Such labelling or modification is known to the person skilled in the art.

[0150] Typically the processing of the substrate will comprise measuring protease activity, for example such protease activity may be detected by cleavage of the substrate. Modulation is taken to mean either an increase or decrease in activity of the enzyme. Such activity may be affected by an alteration in expression of DPP10 or a change in the DPP10's half life or a change in the post-translational modification of the DPP10.

[0151] The present invention further provides a screen for identifying an agent which modulates DPP10 activity comprising:
[0152] providing a DPP10 polypeptide as claimed in any one of claims 8 to 13; providing an agent to be tested;
[0153] providing a cell; and
[0154] measuring whether the agent to be tested modulates DPP10 by measuring adhesion of the cell to a surface

[0155] Such a screen can be referred to as a cell adhesion screen (or assay). The components of the screen are combined, in any optional order.

[0156] Typically cells used in the cell adhesion assay may be maintained in suspension where adhesion is measured by aggregation of the cells due to intercellular adhesion molecule interactions. Alternatively, adhesion to a surface may be measured. The surface may be a non-biological molecule e.g. tissue culture plastic or it may be a biological molecule which is cellular or noncellular. Examples of a noncellular molecule include extracellular matrix components such as fibronectin, collagen and such like. One or more cells or other biological non-cellular molecules may be attached to a surface such as a tissue culture surface or an extracellular matrix component coated surface. Adhesion is determined by measuring the adhesion of a cell to a surface. Modulation in cell adhesion may be either an increase in cell adhesion or a decrease in cell adhesion. An agent is considered to be a modulator of DPP10 activity if it affects DPP10 activity, this may be either at the level of expression of the DPP10 molecule or by altering the half life of the DPP10 molecule or by affecting the post-translation modification status of the DPP10 molecule.

[0157] Yet a futher aspect of the invention provides a screen for identifying an agent which modulates DPP10 activity comprising:
[0158] providing a DPP10 polypeptide as claimed in any one of claims 8 to 13;
[0159] providing an agent to be tested;
[0160] providing a cell;
[0161] measuring a change in differentiation or proliferation of the cell.

[0162] The components of the screen are combined, in any optional order.

[0163] Typically, differentiation may be measured by any means known to the persons skilled in the art for example in the case of a T-lymphocyte, the change in differentiation can be T-cell activation. In the case of other cell types it may be the induction or prevention of production of a secretable cell signalling factor such as an immunomodulator e.g. a cytokine or growth factor, The immunomodulator may be a peptide or may be any other biological substance which expression is altered by an agent which modulates DPP10. Typically this assay is performed in vitro for example in tissue or organ culture.

[0164] The change in phenotype may be any. It may involve a change in T-cell and/or B-cell phenotype.

[0165] Such a screen provides an in vitro model for identifying an agent which modulates DPP10 activity.

[0166] Yet a further aspect of the invention provides a screen for identifying an agent which modulates DPP10 activity comprising:
[0167] providing a transgenic animal according to one of claims 23 to 25 or 59;
[0168] providing an agent to be tested;
[0169] contacting the transgenic animal with the agent to be tested;
[0170] detecting a change in the transgenic animals phenotype.

[0171] The components of the screen are combined, in any optional order.

[0172] The cell against which the agent is tested may be in suspension, tissue culture, as part of an organ or as part of an animal. Preferably the animal is a laboratory animal, such as a rat, rabbit, mouse or other rodent.

[0173] Yet a further aspect of the invention provides a screen for detecting a side effect associated with the use of an agent which modulates DPP10 comprising:
[0174] providing a cell which does not substantially express DPP10;
[0175] providing an agent to be tested;
[0176] contacting the agent to be tested with the cell; and
[0177] measuring any side effect produced by the agent on the cell.

[0178] The components of the screen are combined, in any optional order.

[0179] The side effect to be measured may be any, and may depend on whether the cell is part of a larger tissue or animal. It may involve a change in cell differentiation, or cell proliferation. The side effect may be a measure of the change of phenotype of an organ or animal.

[0180] Yet a further aspect of the invention provides a screen for identifying an agent which modulates DPP10 activity comprising:
[0181] providing a DPP10 nucleic acid according to any of claims 1 to 4;
[0182] providing an agent to be tested;
[0183] measuring whether the agent to be tested modulates DPP10 by measuring the interaction of the agent with the sample of nucleic acid.

[0184] Preferably this screen is an in vitro transcription assay, measuring transcription of DPP10.

[0185] Alternatively, an agent may be identified by the use of theoretical or model characteristics of DPP10. The functional or structural characteristics of DPP10 may be of the protein itself or of a computer generated model, a physical two- or three-dimensional model or an electrical (e.g. computer) generated primary secondary or tertiary structure, as well as the pharmacaphore (three dimensional electron density map) or its X ray crystal structure.

[0186] Putative agents will include those known to persons skilled in the art or new substances, and include chemical or biological compounds, such as anti-sense nucleotide sequences, polyclonal or monoclonal antibodies which bind to polypeptide sequence of the second aspect.

[0187] According to a seventeenth aspect of the invention, there is provided the use of a nucleic acid sequence or polypeptide sequence as defined above in a screen for an agent which modulates the activity of DPP10.

[0188] The method preferably comprises contacting a putative agent with a nucleic acid or polypeptide sequence according to an aforementioned aspect of the present invention and monitoring expression and/or activity of the nucleotide or polypeptide sequence. Potential agents are those which alter the activity or expression of the DPP10 nucleotide or polypeptide sequence compared to the activity or expression in the absence of the agent. The present method may be carried out by contacting a putative agent with a host cell, tissue culture, or transgenic non-human animal comprising a nucleotide or polypeptide according to the invention, and displaying inflammatory disease.

[0189] Also provided are agents identified by the method of the sixteenth or seventeenth aspects.

[0190] Preferred features for the second and subsequent aspects of the invention are as for the first aspect mutatis mutandis.

[0191] The invention will now be described with reference to the following drawings and examples which are included for the purposes of illustration only and are not to be construed as being limiting on the invention.

[0192] FIG. 1 shows the DNA sequence from the chromosone 2 Asthma Locus.

[0193] FIG. 2a shows the MEX4 predicted exon sequence.

[0194] FIG. 2b shows the location of MEX4 within the refined region of linkage disequilibrium and relative to marker D2S308.

[0195] FIG. 2c shows the full length insert sequence and translation of the foetal brain cDNA clone identified by screening with MEX4. The MEX4 sequence is in bold and the start codon is underlined.

[0196] FIG. 2d shows a full length insert sequence of the 3′ RACE clone amplified from primers in MEX4 FB-1.

[0197] FIG. 3 is a schematic of the overlap between the MEX4FB-1 clone and KIAA1492 and between KIAA1492 and AK025075. The full length cDNA sequence is comprised of 25 exons. Exons 1 to 12 (partial) are encoded within the MEX4PB-1 clone. Exons 3 (partial) to 25 are encoded within the KIAA1492 clone. However, the first MET residue available in the KIAA1492 predicted protein occurs at nucleotide 927, resulting in a predicted ORF of only 1629bp. Addition of the first two exons from MEX4FB-1 clone provides the true MET residue and a predicted ORF of 2391 bp from the combined clones.

[0198] FIG. 4 shows the full length sequence of the human DPP10 mRNA generated from an overlap of the MEX4FB-1 and 3′ RACE clones. The MEX4 sequence is in bold and the initiation and termination codons are underlined.

[0199] FIG. 5 shows the full length Mouse DPP10 coding sequence.

[0200] FIG. 5a shows the mouse DPP10 full length CDNA sequence.

[0201] FIG. 6 shows an overview of human DPP10 alternative transcripts 1 to 6, the predicted transmembrane domains, exon 2A (Transcript 6), and the BAC location by accession number.

[0202] FIG. 7 shows a schematic overview of the Mouse DPP10 transcripts.

[0203] FIG. 8 shows the Mouse DPP10 alternative exons, the predicted peptide sequence of transcripts 1 to 4 and the full length sequence of the transcript 1.

[0204] FIG. 9 shows the sequences of the human alternate exons 1b to 1g and alternate exon 2A, liver clones 1 to 3, exons 2B to 2G, the predicted peptides from Transcripts 1 to 6, the predicted peptides for the exon 1b 3′RACE clone transcripts 1 to 5, the human transcript 6 (MEX4-6 “stopper”) sequence and the human 3′RACE clone sequence.

[0205] FIG. 10 shows the sequences of the DPP10 exons. The 5′UTR is included in exon 1a and the 3′UTR sequence in exon 25. The coding regions of these two exons are in bold.

[0206] FIG. 11 shows the DPP10 predicted protein sequence of 796 amino acids.

[0207] FIG. 12 shows the amino acid sequence of DPP10. Amino acids 34-54 (underlined) are predicted to traverse the membrane. Repeat sequences within β-propellers are shown in bold italics. Residues homologous to catalytic residues are underlined and shaded.

[0208] FIG. 13 shows Northern blots of DPP10 which demonstrates the presence of multiple transcripts.

[0209] FIG. 14 shows multiple alignment of the catalytic domains of DPP10 homologues. Asterisks (*) mark the catalytic site positions.

[0210] FIG. 15 shows a schematic of exon 1b 3′RACE transcripts.

[0211] FIG. 16 shows a multiple alignment of the transmembrane region of DPP10 and homologues.

[0212] FIG. 17 shows a multiple alignment of the β-propellor domain of DPP10 and prolyl oligopeptidase homologues.

[0213] FIG. 18 shows the proposed structure of porcine prolyl oligopeptidase (Fulop V, Bocskei Z, Polgar L. (1998) Prolyl oligopeptidase: an unusual beta-propeller domain regulates proteolysis. Cell 1998 July 24;94(2):161-70).

[0214] FIG. 19 shows the cytokines containing P×S motifs. Human chemokines and cytokines that have a serine within 10 amino acids of a predicted signal peptide cleavage site and which contain a P×S motif (where X represents any amino acid). The predicted signal peptide cleavage bond is shown as “\hat{ }” and P×S motifs are highlighted. The first group of molecules contain the P×S two residues after the cleavage site.

[0215] FIG. 20 shows RT-PCR linking MEX4 with downstream DPPIO exons in adult brain cDNA. The expected Sl9bp product is observed in lane 1 with MEX4.F1 and MEX4.R1 and the expected 919bp product is observed in lane 4, with MEX4.F1 and MEX4.R2. The marker (lane M) used is lOobp ladder. Negative controls (genomic DNA and water (H20) were included.

[0216] FIG. 21 shows the sequence alignment of the mouse and human DPP10 transcript 1 peptides.

[0217] FIG. 22a shows linkage disequilibrium within the asthma locus.

[0218] FIG. 22b shows the location of DPP10 exons within the LD map. The disposition of the initial exons of DPP10 are shown relative to the LD map.

[0219] Significant association to the LmIgE and asthma is indicated by arrows above the exons. The scale bar indicates a distance of 50 Kb.

[0220] FIG. 23 shows CLUSTAL X multiple sequence alignment of DPPX-L (DPP6): Genbank Accession P42658 (DPP6); DPPX-S: Genbank Accession P42658; DPP4: Genbank Accession AAA53208.

[0221] FIG. 24 shows the DPP10 alternative 1g fetal liver transcripts.

[0222] FIG. 25 shows the BAC/PAC contig at chromosome 2q14 showing refined region of linkage disequilibrium and relative location of marker D2S308.

[0223] FIG. 26 shows an example of pyrosequencing for SNP genotyping.

[0224] FIG. 27 shows a western blot of diluted human serum samples probed with anti-DPP10 c-terminus antibody.

[0225] TABLE 1a shows SNPs identified in the sequence of FIG. 1 (LD region).

[0226] TABLE 1b shows SNP's genotyped in the sequenced region of FIG. 1 (ID region).

[0227] TABLE 1c shows DPP10 gene SNP outside of the LD region.

[0228] TABLE 2 shows PCR primer sequences and positions in the sequence of FIG. 1.

[0229] TABLE 3 shows associations between asthma and the LnlgE and SNPs.

[0230] TABLE 4a shows primer pair sequences used in RT-PCR.

[0231] TABLE 4b shows RT-PCR expression data

[0232] TABLE 5 shows regions of sequence conserved between human and mouse. Co-ordinates are given with reference to FIG. 1.

[0233] TABIE 6 shows PSQ assay oligonucleotides and PCR annealing temperatures.

[0234] TABLE 7 shows standard deviation in DPPIO expression levels ascertained by Taqman analysis of blood RNA from asthmatics and controls.

### EXPERIMENTAL EXAMPLES

Overview of the Experiments Performed:

[0235] Novel SNPs were identified by re-sequencing sections of the ˜462 kb contig around marker D2S308 in DNAs from asthmatic and control individuals. These SNPs were gentoyped across a panel of asthmatic families from three populations. Association analysis was performed by transmission disequilibrium tests (TDT), and identified several SNPs showing positive association with asthma. The genotype data from all the SNPs was used to refine the extent of linkage disequilibrium (LID) around the microsatellite marker D2S308 and the associated SNPs. A 113, 792 bp region of sequence, containing the associated marker and SNPs and termed the Island of LD, was selected for transcript identification.

[0236] In silico analysis of public sequence databases showed that no known genes map within the island of LD. The only expressed sequence tags (ESTs) which map into the region are: AA424226, H10825 and AA42637. Therefore extensive DNA sequence analysis was undertaken to identify coding DNA sequences within the 113792bp island of LD. Using exon prediction algorithms, a putative coding sequence of 60 bp (designated MEX4) was identified. Screening of a cDNA library with a DNA probe containing MEX4 identified a 1301 bp cDNA clone (MEX4FB-1). BLASTN analysis against the Genbank nucleotide (nr) database identified 100% nucleotide homologies to 2 sequences—AB040925 and AK025075. Using this information it was possible to assemble a composite full length cDNA clone with a predicted open reading frame of 2391bp. Subsequent 3′ RACE experiments from the end of the MEX4FB-1 clone, confirmed this predicted sequence as the C-terminal part of the gene and 3′ UTR. Further 5′ RACE experiments were performed from exon 3 and identified six other alternate N-terminal exons arranged in five transcript types. Further 3′ RACE from Mex4/exon 1a, identified one additional C-terminal exon (2a) which formed part of a short cDNA with Mex4/exon 1a Genomic structure analysis showed that the gene contains twenty five exons and spans a large region of genomic DNA of ˜1 MB. Based upon this structure the marker D2S308 falls within intron 1. The sequence of the clone AB040925, encodes part of exon 3 to exon 25, however because intron 1 is several hundred kb in length, no in silico prediction programmes predicted that this clone was spliced downstream of exon 1a.

[0237] RT-PCR and Northern blot analysis was performed to analyse DPP10 expression, which was revealed to strongly express in a neuroendocrine fashion with evidence of multiple transcripts. DPP10 was also shown to be expressed in PBL and expression level in asthmatics and controls were assessed by Taqman analysis of total blood RNA.

[0238] A transmembrane domain is present in the peptides predicted from two of the five transcripts. Subsequent cellular localization studies with epitope tagged DPP10 constructs for transcript 1 and 2, transfected into Hela cells, have confirmed the membrane and cytosolic localizations predicted for these two transcripts.

[0239] BLASTX analysis against the Swissprot protein database detected significant homologies with a class of proteins known as dipeptidyl peptidases (prolyl-oligopeptidases), the most significant homology being with DPP6. The gene at Chromosome 2q14 represents a novel dipeptidyl peptidase, DPP10.

### Example 1

SNP Discoverv and Association Testing

Subjects and Phenotyping

[0240] The subjects were administered a modified British MRC respiratory questionnaire. “Asthma” was defined as a positive answer to the questions “Have you ever had an attack of asthma?” and “If yes, has this happened on more than one occasion?““Wheeze” was defined as a positive answer to the question “Has your chest ever sounded wheezing or whistling?” and “f yes, has this happened on more than one occasion?” The total serum IgE was measured in all children. Slin tests to house dust mite and grass pollen was carried out.

[0241] Three panels of subjects have been studied.

[0242] Panel A consisted of 80 nuclear families sub-selected from an Australian population sample of 230 families. The panel contained a total of 203 offspring forming 172 sub-pairs. 12% of the children were asthmatic.

[0243] Panel B consisted of 77 nuclear and extended families recruited from asthma and allergy clinics in the United Kingdom. These families contained 215 offspring (268 sib-pairs) of which 56% were asthmatic.

[0244] Panel C consisted of 87 nuclear families recruited through a child attending an asthma clinic in the Oxford region. The families contained 216 offspring (148 sibling pairs), of whom 44% where asthmatic.

Positional Cloning and SNP Discovery.

[0245] We built an extended BAC/PAC contig covering 1.5 Mb of the locus and sequenced approximately 465 kb from four contiguous clones surrounding D2S308. SNP detection was systematically carried out on regions of DNA that were free of repeats by sequencing 5 unrelated subjects and 5 controls with and without asthma and a pool of DNA from 32 unrelated individuals.

[0246] 100 SNPs were identified with minor allele frequencies >20%, and 67 of these were genotyped on our subjects. SNP typing was by PCR and restriction digestion. In the absence of a natural restriction sequence, a primer was modified to generate a site. (Primers pairs are given in Table 2). Error checldng and haplotype generation was carried out by the MERLIN computer program (Abecasis 2001). Linkage disequilibrium (LD) between markers was assessed by estimation of D′ from the parental haplotypes (Abecasis et al., Am J Hum Genet 59 323-36 (1995)) and portrayed by the GOLD program Abecasis et al., Bioinfarmatics 16 182-3 (2000)). LD was distributed into four distinct islands (A, B, Bii and C) (FIG. 22a). The border between the A and B island was flanked by the 543WTC91P and 543WTC122P SNPs (Tables 1a, 1b and 1c).

Association Testing

[0247] Association was sought between Asthma and the SNPs by transmission disequilibrium tests (Spielman et al Am J Hum Genet 59 983-9 (1996)). (Table 3) (FIG. 1). Positive associations were confined to the B island of ID (FIG. 22b). The strongest association was observed with the 543WTC122P SNP, approximately 1 Kb proximal to D2S308: weaker associations were observed more distally, between 543WTC11OP and 317WTC59P (9 Kb and 59 Kb away) (Table 3).

[0248] Association was also sought between the Loge (gE concentration) LnIgE) and the SNPs by variance components analyses (Abecasis et al Am J Hum Genet 66 279-292 (2001)) (Table 3). Moderate evidence for association was detected in the A island of ID, over a region of approximately 60 Kb. The complete separation of LD between the A and B islands suggested that this QTL was different to the polymorphism affecting asthma status from the B island. The alleles of D2S308 are described in WO99/50451.

[0249] SNP DP007, (Table 1c), located in the 3′ UTR of the DPP10 gene showed positive association to Rasti (p=0.002), Psti (p=0073) and loge (p=0.0263).

### Example 2

Determination of the Full Length Sequence of a Novel Dipeptidylpeptidase-Like Gene, DPP10.

Gene Identification

[0250] In order to identify genes within the associated sequence region, sequence similarity searches were performed using BLAST analysis against the public sequence databases (Althschul et al., 1997). No significant sequence identities or similarities to reported genes were identified. The only evidence for any coding sequence in the region were the DNA sequence matches to two ESTs; H10825 (IMAGE clone 46982) and AA426377 (MAGE clone 757495).

Identification of Conserved Exons

[0251] The next stage of analysis was to identify potential coding regions in the 113,792bp of DNA sequence by the use of exon prediction software. The sequence from the refined region of LD was subjected to exon prediction analysis by submission to the NIX site at Human Genome Mapping Project (HGMP) Resource Centre (http://www.hgmp.mrc.ac.uk/homepage.html). This site incorporates the following exon prediction programmes; Grail/exon, Grail/gap2, MZEF, GENSCAN, Genemark, hmm.gene, FGENE, FEX, Genefinder and FGENES. For all DNA sequence analysis, default settings were used.

[0252] Over 100 exons were predicted in the region, 66 by more than one programme. The group of multiple-predicted exons included a 60bp exon designated as MEX4. The sequence of this predicted exon sequence is detailed in FIG. 2a MEX4 was identified by the FGENE/FEX software, with significance scores of 0.65 and 0.7 respectively. The location of MEX4 within the refined region of linkage disequilibrium and relative to DNA marker D2S308 is shown in FIG. 2b.

[0253] PCR primers were designed to putative exon sequences predicted by more than one algorithm. PCR products generated from these oligonucleotide primer pairs were used in low stringency hybridisations against “zoo strips”—Southern blots containing restriction enzyme-digested DNA from human and mouse genomic DNA. MEX4 showed weak hybridisation to the mouse DNA lanes (data not shown) and therefore was considered to harbor sequences conserved between the two species, indicative of functional, coding, DNA sequences.

Library Screening

[0254] A probe containing the MEX4 sequence was used to screen a commercial foetal brain cDNA library prepared in the lambda-triplex phage vector (Clontech). Approximately 1 million phage clones were plated out onto twenty 15 cm Luria agar plates, and duplicate colony lifts performed using 132 mm circular nylon transfer membranes (Hybond N+, Amersham). All procedures were performed according to the library manufacturer's published protocols (http://www.clontech.com/libraries/#techinfo, protocol PT3003-1, version PR09529). The MEX4 probe was labelled with α²P-dCTP using a random labelling kit (“Prime-it RmT random primer labeling kit, Stratagene) and purified through a G50 Spin column (Quick Spin™ columns, Boehringer Mannheim) according to the manufacturer's instructions. The library filter set was hybridised using a phosphate/SDS buffer (0.5M NaPO₄, 7% SDS, 1 mM EDTA pH 8.0) at 65° C. for 16 hours. Filters were washed twice with 2L of 2×SSC/0.01% SDS for 30 minutes at 65° C. and once with 1×SSC/0.01% SDS for 30 minutes at 65° C., then exposed to autoradiographic film (Kodak X-OMAT) for two days with signal intensifying screens (Hyperscreen, Amersham).

[0255] Three duplicated positive plaques were identified on the filters. Each pool of positive phage plaques was “cored” using a cut-off 1 ml pipette tip. The plug of agar and plaques were put into a 2 ml screw cap microcentrifuge tube containing 1 ml of lambda phage dilution buffer (100 mM NaCl, 10 mM MgCl₂, 35mM Tris-HCl pH 7.5, 0.01% gelatin). Phage dilutions of 1:100, 1:1000 and 1:10,000 were prepared and plated out onto a series of secondary plates. Colony lifts were performed as above and the filters hybridised with MEX4 probe as above.

[0256] At this stage one positive clone was chosen to carry forward for further investigation. This was named MEX4FB-1. Single hybridising plaques were available for this clone. One plaque was cored using a cut-off Iml pipette tip and diluted with 350 μl of lambda phage dilution buffer. A 10 ml Luria broth culture of BM25.8 cells was grown OIN at 31° C. and inoculated with 150W of the recovered phage plaque to perform plasmid extraction according to the library manufacturer instructions. 20 μl of final plasmid broth was plated out onto a Luria agar plate containing 50 μg/μl of ampicillin and incubated O/N at 37° C.

Plasmid DNA Preparation

[0257] Two colonies of MEX4FB-1 were picked from the plate and grown shaking at 37° C O/N in 10 mls of luria broth supplemented with 50 μg/μl of ampicillin. Plasmid DNA was isolated using the QlAprep Spin Miniprep Kit (QIAGEN), according to the manufacturer's instructions. DNA yields were quantified for sequencing using a DNA fluorometer (Hoeffer Ltd).

Sequencing

[0258] Plasmids were sequenced according to the protocol of the dynamic ET terminator cycle sequencing kit (Amersham). Initially forward and reverse vector sequencing primers were used, cDNAlibseq.R[dTCCGAGATCTGGACGAGC]and cDNAlibseq.R [dTAATACGACTCACTATAGGG]. The DNA sequence generated from two plasmid end reads did not overlap, so sequencing was also performed with two internal walking primers;

| | |
|---|---|
| MEX4-6 FB 21.FW | [dTTTGTGCTTCACGATCCAGAGG]; |
| and | |
| MEX4-6 FB 21.RW | [dGATGTCAGTCGCAATGAACTGC] |

to obtain full length insert sequence. This 1,301 bp sequence is presented in FIG. 2c. Identical sequence was obtained from both of the two colonies of MEX4FB-1 picked in the plasmid preparation stage.

[0259] Each DNA sequencing reaction used: 400 ng template DNA, 0.25 pmol primer, 8 μl ET Terminator mix and distilled H₂0 to a final reaction volume of 20 W. The cycle conditions used were: 96° C. for 30 sec, 50° C. for 20 sec, 60° C. for 1 min for 25 cycles, with a final holding cycle at 4° C. prior to DNA purification. Sequencing products were purified by gel filtration (plO gel) followed by ethanol precipitation. Dry DNA pellets were resuspended in 2 μl deionised formamide and denatured at 96° C. for 2.5 min, followed by snap-cooling on ice. 1 μl of each reaction was loaded onto a 48 cm sequencing gel and run for 10 hours on an ABI 377 Sequencer and the data collected using filter set A. Sequence traces were analysed using the SEQUENCHER™ sequence analysis software, version 4.0.5b5 (Gene Codes Inc.).

Sequence Analysis by BLASTN to Determine Overlapping Clones

[0260] The MEX4FB-1 clone sequence was used in a BLASTN analysis against the Genbank nucleotide NR database to identify any sequence matches (Altschul et al., 1997). A 100% nucleotide match was identified from MEX4FB-1 nucleotides 409 to 1301 to the 5′ end of a partial cDNA clone, KIAA1492 (Genbank: AB040925) (Nagase et al., 2000). This clone extends 3,349bp 3′ to the end of MEX4FB-1. The full length sequence of AB040925 was retrieved via the National Center for Biotechnology Information (NCBI) website (http://www.ncbi.nlm.nih.gov/) using the Entrez nucleotide search facility. This full length AB040925 sequence was also subjected to BLASTN analysis against the NR database. This identified a second cDNA clone, AK025075, 2,225bp in length with a 99% match with AB040925 over 2,210bp. The only mismatches were at the 3′ end of the clone where a poly-A tail is present in AK025075, but not in AB040925. Therefore, it would appear that there may be two different 3′ ends to the gene as the two cDNAs AB040925 and AK025075 are of different lengths. A schematic overview of these alignments is presented in FIG. 3.

[0261] The first available methionine residue in the AB040925 sequence is 509 bp from the 5′ end of the clone in the +2 reading frame. The predicted open reading frame (ORF) from this position is 1,629 bp in size. Upstream of this methionine are 169 coding residues, representing a full ORF. This implies that the reported AB040925 sequence is not full length. By combining the MEX4FB-1 clone with the overlapping AB040925 sequence a start methionine was identified at nucleotide position 165. Upstream of this methionine is a single coding residue, preceded by a STOP codon. The addition of the MEX4FB-1 sequence therefore provides the correct 5′ end and start codon for this gene and results in a predicted ORF of 2,391bp, encoding 796 amino acid residues. The combined sequence from these three clones, utilising the shorter 3′ end represented by the sequence of clone AK025075, is presented in FIG. 4.

Sequence Analysis by BLASTN to Determine Genomic Structure

[0262] The composite DNA sequence (FIG. 4) from the combined cDNA clones was used in a BLASTN analysis against the HFGS database (Altschul et al., 1997). This resulted in the identification of multiple BAC clones containing portions of the gene sequence. In total 24 exons were identified within the cDNA sequence (FIGS. 9 and 10). By comparison of the relative positions of these BAC clones on chromosome 2, it is apparent that the DPP10 gene spans a large region of genomic DNA. (http://genome.ucsc.edu/goldenPath/septTracks.html and http://www.ncbi.nlm.nih.gov/cgi-bin/Entrez/hum_srch?chr=hum_chr.inf&query). Most of the BACs detailed in Tables la to Ic are in working draft, unfinished status, so current estimates could vary, but it appears that the gene spans approximately 1.2Mb of DNA at chromosome 2q14.

Expression Analysis:

[0263] The primers:

| | |
|---|---|
| MEX4.F1 | [dAACCAAACTGCCAGCGTGTCC]; |
| MEX4.R1 | [dAAGACGGAGTCCTCTACTTCTGG]; |
| and | |
| MEX4.R2 | [dATGGACCAACTCACACTTTGGAGC] |

were designed to.perform RT-PCR on cDNA from adult brain. This experiment was performed to confirm that the MEX4 exon is linked to the DPP10 exon sequences found in the clones AB040925 and AK025075, in a second cDNA source in addition to the isolated foetal brain clone. The primer MEX4.F1 is located at the beginning of the MEX4 exon, (DPP10 exon 1), the primer MEX4.R1 is located in DPP10 exon 6 and the primer MEX4R2 is located in exon 10. A 519bp product is expected if MEX4.1 is used in conjunction with MEX4.R1 and a 919bp product when MEX4.F1 is used with MEX4.R2. The PCR conditions used were; -50ng of cDNA (Marathon ready RACE cDNA, Clontech), in a 50 μl reaction with 10 pmoles of each primer, 2.5 μM dNTPs 1.5 mM Magnesium Chloride, and 0.5 units of Amplitaq Gold in 1× amplitaq gold buffer II, (Perkin Elmer Biosystems). Cycling conditions were 95° C. for a single 12 minute cycle, then 38 cycles of a 94° C. denature for 15 secs, 60° C. anneal temp for 15 secs, and 72° C. for 30 secs, followed by 72° C. for 5 minutes. A 50 ng aliquot of genomic DNA was used as a negative control as well as a no-DNA control. A 5 μl aliquot of each reaction was run out on 1% agarose gel prepared with 1XTBE using standard methods. The results are shown in FIG. 20. A clear band is seen in the brain lane for each reaction indicating that the MEX4 exon is expressed, linked to DPP10 downstream exons in adult brain as well as foetal brain cDNA.

[0264] The 519bp RT-PCR product was gel purified using the QIAquick Gel Extraction Kit, (QIAGEN) according to the manufacturers instructions and used as a probe in Northern blot analysis. A single 50ng labeled probe was hybridised to three purchased Northern blots (MTNI, MTNII and MTNIII, Clontech) which represent mRNA from 23 different tissues. Labeling with α³²P-dCTP was as reported for the cDNA library screening. Hybridisation was at 65° C. in EXPRESSHYBE™ buffer (Clontech). Washing was twice with 500ml of 2×SSC/0.01% SDS for 30 minutes at 50° C. and once with 500 mls 1×SSC/0.01% SDS for 30 minutes at 50° C. The filters were then exposed to autoradiographic film for two days with signal intensifying screens.

[0265] The results are shown in FIG. 13. A doublet band comprised of two separate hybridising bands of between 3.6-4.1 kb was clearly observed in pancreas, testes, spinal cord and adrenal gland following a 48-hour exposure. Much weaker expression of these products was observed in placenta, liver and small intestine. This doublet band was also seen in brain, in addition to two additional larger transcripts of 5.2kb and 7.5kb. Overall, the strongest expression was observed in brain, pancreas and adrenal gland.

[0266] Additional RT-PCR was performed on cDNA from tissue and cell lines. The RNA from different cell lines and tissues was extracted with RNeasy Mini Kit (Qiagen, #74104) except human PBL for which PAXgene Blood RNA Kit (Qiagen, #762132) was used. cDNA was prepared from the RNA using OMNISCRIPT Reverse Transcriptase Kit (Qiagen, #205111) followed by PCR with HotStar Taq PCR Kit. PCR was performed for 38 cycles (1 min at 95C, 1 min at 54C and 1 min at 72C per cycle). A number of different PCR primer pairs were used. These amplified between exon 1a to 7 (transcript 1 specific), exons 1b to 7 (transcript 2 specific) and exons if and 7 (transcript 5 specific). Primer pairs amplifiying between exons 2 and 7 and exonsl9 and 25, which are predicted to be present in all transcripts, were also used. The final two primer pairs tested for the presence of mouse transcripts 2 (mus-exon 1c to 7) and 3 (mus-exon 1e to 7). These primer sequences are presented in Table 4a. The expression data is summarized in Table 4b.

RT-PCR Cloning of Novel Liver Transcripts:

[0267] RT_PCR on liver cDNA using primers in exon 1g and 10 resulted in the amplification of bands of an unexpected size. These bands were cloned into the TOPO 2.1 PCR cloning vector (Invitrogen) according to the manufacturers instructions. Insert positive clones were sequenced and the sequence compared to the original DPP10 clone. A total of 3 alternate transcripts were identified FIGS. 9 and 24).

Sequence Analysis by BLASTX to Deternine Sequence Homologies

[0268] The nucleotide sequence from the combined cDNA clones was used in a BLASTX analysis against the Swissprot database (Altschul et al., 1997). This identified a number of closely related protein sequences from different species. The two most closely related proteins were the human dipeptidyl-peptidase VI (DPP6) protein (XP004709; P42658), 71 % similarity, and the human dipeptidyl-peptidase IV (DPP4) protein (AAA52308), 52% similarity. Given the relatedness of the chromosome 2q14 predicted peptide to DDP6 and DPP4, it has been named DPP10. DPP6 is also known as DPPX, and 2 different isoforms of DPPX are known to exist: DPPX-L and DPPX-S. A Clustal-X alignment of DPP10, DPPX-L, DPPX-S and DPP4 is shown in FIG. 23.

DPP10 Protein Sequence Analysis

[0269] The composite DPP10 transcript encodes a predicted protein of 796 amino acids. By comparison with DPP6 and DPP4, it is possible to identify a number of domains and residues characteristic of Class S9B serine proteases (FIG. 11). In DPP10, the serine residue of the catalytic triad Ser-Asp-His, is replaced by glycine. In addition, DPP10 has an NH2-terminal cytoplasmic domain of 34 amino acids, a single transmembrane-spanning domain, a P-propeller domain (required for catalytic activity) and 5 potential N-glycosylation residues.

Human DPP10 Alternative Transcript Characterisation

[0270] Human 5′ and 3′ RACE experiments were performed from a range of tissues using commercially prepared RACE ready cDNA (Marathon Ready cDNA, Clontech) according to the manufacturers instructions. The nested primers for 5′ RACE were designed within DPP10 exon 3, with a check primer in exon 2;

| | |
|---|---|
| DPP105′RACE.R1 | TCATTGATCCACCGAGCCTCTGG; |
| DPP105′RACE.R2 | ACCGAGCCTCTGGATCGTGAAGC; |
| and | |
| DPP105′RACE.check | GCTCACTCATCACTATGTCAG. |

[0271] The nested primers for 3′ RACE were designed in exons 10 and 11 with a check primer in exon 19;

| | |
|---|---|
| DPP103′RACE.F1 | AGTCTGTGAGACCACTACAGGTGC; |
| DPP103′RAGE.F2 | TGAGATGACATCAGATACGTGGC; |
| and | |
| DPP103′RACE.check | GGAACTTATCTGTAACCAGCTGG. |

[0272] First and second round nested PCRs were run out on 1.2% agarose, blotted and hybridised with the internal check oligo to confirm that RACE products contained the correct predicted sequence. lOOng of oligo was end labeled with γ²pAT? using 10 units of T4 polynucleotide kinase (NEB) and hybridised in a phosphate/SDS buffer (above) at 50° C. O/N. Filters were washed to 0.5×SSC/0.01% SDS at 50° C. Hybridising PCR products were cloned into the PCR2.1TOPO vector (Invitrogen) according to the manufacturers instructions. White colonies were picked into 125pl of luria broth with ampicillin and grown O/N before stamping onto nitrocellulose filters (Hybond N+, Amersham) and growing ON on L13 agar plates. Colony filters were processed using standard techniques and screened with the internal check oligo to identify clones containing the correct sequence. Plasmids were prepared and sequenced as above.

[0273] In addition 5′ and 3′ RACE experiments were performed from within MEX4/Exon 1a. In this case no check primer was available and PCR products were directly cloned into PCR2.1 TOPO without prior selection by hybridisation. The nested primers used for 5′ RACE were MEX4RACE.R1 CTTGATTGTTTTTGAGGGTTGACAC and MEX4RACE.R2 GTGAGAACTCCACTTAAGGATGCC and for the 3′ RACE were MEX4RACE.F1 AACCAAACTGCCAGCGTGTCC and X4RACE.2 GTCCCATCACATCAAGTGTCAACC.

[0274] Five different transcripts were identified, designated 1 to 5 (FIG. 6) containing seven different exons, designated 1a to 1g FIG. 9 where MEX4 is Exon 1a). Transcripts 1-3 were isolated from brain and foetal brain cDNA and 4 and 5 were isolated from pancreas. The sequence of the 3′ RACE clone is presented in FIG. 2d. This encodes from exons 11 to 25 including 970 bp of 3′UTR.

[0275] In addition 3′ RACE was also carried out using primers rooted within exon 1b. First round RACE was performed using DPP101bRACE.F1 TGCTGCCATCCGTAAATTGGAGG and second round RACE was performed with DPP101bRACE.F2 TGGAGCTTGGTATGCTGGTTAGG. PCR products were cloned directly into PCR2.1 TOPO prior to sequencing. A total of five different transcripts encoding five short peptide sequences were identified. The arrangement of these exons is summarized in the schematic in FIG. 15, and the exon sequences and predicted peptides from the full transcripts are presented in FIGS. 2d and 9.

Identification and Characterisation of Mouse DPP10

[0276] BLASTN analysis using human DPP10 sequence against the mouse EST database identified an EST with 84% nucleotide identity, (Genbank accession number BE862767) to the human sequence. This insert of this clone was sequenced and used to design nested 5′ RACE primers and an internal RACE check oligo. RACE was performed as described previously and the PCR products cloned into PCR2.1TOPO. Sequence from these clones was used to design a second set of 5′ RACE primers. The major transcript identified encodes a 2370bp ORF with a predicted peptide sequence of 789 residues (FIG. 8). The mouse sequence is 84% identical at the nucleotide level to the human gene. A.protein:protein alignment is provided (FIG. 21).

Mouse DPP10 Alternative Transcript Characterisation

[0277] A total of 4 different mouse DPP10 transcripts were characterised designated 14, containing 5 different exons 1a-1e (FIG. 7).

[0278] Human vs. Mouse Comparative Sequence Analysis

[0279] Seventeen contigs generated from mouse BAC clones were extracted and formatted into a blast database. This database was searched with the full 462.541 kb human sequence by BLASIN (NCBI BLAST 2.2.1) to determine the order of the 17 mouse contigs relative to the human sequence. The results were then used to create a single sequence that was composed of the original contigs ordered by the Blast results. This sequence and the Human 25 Kb sequence were masked for repeats by RepeatMasker version 07/07/2001. Human25Kb is a contiguous region of 25 kb human DNA seqeunce encompassing MEX4. Within the sequence Human25Kb, MEX4 is located at nucleotides 3235 to 3295.

[0280] The masked mouse contigs combined from 17 pieces sequence was formatted into a blast database and searched with the masked Human25 Kb sequence. Fourteen significant HSPs (expectation e-value <1) and with greater than 80% sequence identity where identified, the relevant mouse sequence was extracted and formatted into a blast database. This database was searched by BLASTN with the masked Human25 Kb sequence as the query sequence. and results obtained (Table 5). These regions of sequence conservation may serve as regulatory domains for the DPP10 gene.

SNP Discovery in DPP10 Gene

[0281] Primer pairs were designed to amplify each exon plus some flanking intronic sequence from a panel of 23 control DNAs and 31 asthma patient DNAs. PCR products were subjected to mutation detection by denaturing high performance liquid chromatography (DHPLC) using a Transgenomic WAVE instrument (Transgenomic Inc.). Mutation detection temperatures were determined empirically by melting curve analysis. DNAs showing heteroduplex profiles were sequenced using PCR direct sequencing and analysed using the SEQUENCHER™ sequence analysis software, version 4.0.5b5 (Gene Codes Inc.) to identify polymorphic bases. An arginine to proline amino acid substitution (C125G) was identified in Exon 10.

TAAACATACATTTTAATTTTGTTTCCAAACTAGAGAATACTATATCACT
ATGGTTAAATGGGTAAGCAATACCAAGACTGTGGTAAGATGGTTAAAC
CGAC/GCTCAGAACATCTCCATCCTCACAGTCTGTGAGACCACTACAG
GTGCTTGTAGTAAAGTGAGTATAATTTATTTTTCTTTTATGCCTAAAAT
GAAGTAGCTTATGCAGCTTTACAAAGGGGAAACAGGAAATGCTTTGTA
CAAAAAAAATTCAGTGTTTAACTTTTAAAACTAATAGGAAAAG

[0282] Additional SNPs within the FIG. 1 sequence are presented in Tables 1a and 1b, SNPs in the remainder of the DPP10 gene are in Table ic.

SNP Genotyping by Pyrosequencing™

[0283] A pair of oligonucleotides for amplification by PCR was designed on either side of each biallelic polymorphism to produce a product size between 50 bp and 350 bp. A sequencing oligonucleotide was designed to end within 30bp either 5′ or 3′ to each polymorphic site. All amplification oligonucleotides used to generate the complementary strand to the sequencing primer were labeled with a 5′ —Biotin. (see Table 7)

[0284] For each marker, all samples genotyped were amplified by PCR using the PCR amplification oligonucleotides. Each reaction used: 20 ng DNA (dried down), 0.6 units of AmpliTaq Gold™ DNA polymerase, 1×PCR Buffer II, 2.5mM MgCl₂, 1 mM dNTP, and 10 pmol of each PCR oligonucleotide in a final volume of 10 μl. The PCR cycling conditions used were: 95° C. for 12 min, 45 cycles of: 94° C. for 15 sec, T_{A} for 15 sec (Table 2), 72° C. for 30 sec, and 72° C. for 5 min.

[0285] After amplification the DNA strand of each PCR template complementary to the sequencing primer was isolated, ready for pyrosequencing (PSQ). To do this, 1) 50 μl of Dynabead solution (2 mg/ml Dynabeads®, 5 mM Tris-HCl, 1M NaCl, 0.5 mM EDTA, 0.05% Tween 20) was added to the PCR product and shaken at 65° C. for 15 min, 2) the template was transferred using magnets to 50 μl of 0.5M NaOH for 1 min, 3) the template was transferred using magnets to 100 μl of 1× Annealing buffer (20 mM Tris-Acetate, 5 mM MgAc₂) for 1 min, and 4) the template was transferred using magnets to 451 μl of 1× Annealing buffer containing 15 pmol of sequencing oligonucleotide (Table 2).

[0286] After template isolation, the sequencing oligonucleotide was annealed to the template by denaturing at 80° C. for 2min and then cooling to room temperature for 10 min. Each marker/sample combination was then sequenced/genotyped by pyrosequencingtm on a PSQ96™ (Pyrosequencing AB) (FIG. 26). Genotype results were stored in the PSQ oracle® database ready for statistical analysis.

Cellular Localisation of Transcript 1 and Transcript 2:

[0287] HeLa cells were transfected with pcDNA3. 1IV5-His-DPP10 (exons 1a to 25) or pcDNA3.1N5-His-DPP10 (exon 2 to 25) using lipofectamine as transfection reagent. After 2 days gene expression, the cells were immuno-stained with mouse antibody against V5 followed with anti-mouse antibody conjugated with Alexa Fluor 546 either before or after fixation. For pre-fix staining, the immuno-reaction was direct performed on living cells using a buffer containing 1% BSA without detergent, and then the cells were fixed with 3% paraformaldehyde. For post-fix staining, the cells were fixed with 3% paraformaldehyde first and then followed by immuno-staining in the presence or absence of 0.1% saponin. The stained cells were observed under Leica

DM[E2 Fluorescence Microscope.

[0288] Over-expressed full length DPP10 shows a membrane protein pattern. Post-fix staining revealed that the membrane structure is distributed on nuclear envelope, plasma membrane and in cytoplasms This result was also confirmed by transfection with a GFP tagged vector, plasmid pcDNA3.1/NT-GFP-DPP10 (exon 1a to 25) into HeLa cells. Full length DPP10 is detectable on cell surface. Positive staining was obtained from pre-fix immuno-reaction on full length DPP10 expressed cells, which suggested that a) full length DPP10 is distributed on plasma membrane; b) it is a transmembrane protein and accessible for antibody from outside of the cells. The C-terminus of full length DPP10 is in the extracellular domain of the protein since the C-terminal tag V5 was detected by antibody under pre-fixation condition.

[0289] Over-expressed DPP10 transcript 2 exhibits cytosolic profile. It was positive only under post-fixation but not pre-fixation condition.

Expression Analysis:

[0290] RT-PCR was performed on cDNA from tissue and cell lines. The RNA from different cell lines and tissues was extracted with RNeasy Mini Kit (Qiagen, #74104) except human PBL for which PAXgene Blood RNA Kit (Qiagen, #762132) was used. cDNA was prepared from the RNA using OMNISCRIPT Reverse Transcriptase Kit (Qiagen, #205111) followed by PCR with HotStar Taq PCR Kit. PCR was performed for 38 cycles (1 min at 95 C, 1 min at 54 C and 1 min at 72 C per cycle). A number of different PCR primer pairs were used. These amplified between exon 1a to 7 (transcript 1 specific), exons 1b to 7 (transcript 2 specific) and exons If and 7 (transcript 5 specific). Primer pairs amplifiying between exons 2 and 7 and exonsl9 and 25, which are predicted to be present in all transcripts, were also used. The final two primer pairs tested for the presence of mouse transcripts 2 (mus-exon 1c to 7) and 3 (mus-exon 1e to 7). These primer sequences are presented in Table 4a The expression data is summarized in Table 4b.

Quantitive PCR to Evaluate DPP10 Expression in Asthmatic and Control Bloods:

[0291] RNA and cDNA preparation from Blood. A total of 7.5 mls of blood was collected per patient (20 mls per control) into PAXgene™ blood RNA tubes (PreAnalytiX, Qiagen/BD) using a BD Safety-Lok™ blood collection set as described by the manufacturers. The PAXgene™ blood RNA tube was inverted 10 times and stored between 3 hours and 1 day at room temperature. The samples were then either processed or stored for up to 5 days at +4° C. The samples were prepared as described by the manufacturers (PreAnalytiX, Qiagen/BD) instructions. Multiple samples from the same individual were pooled into a 2 ml eppendorf tube. The samples were then denatured at 65° C. for 5 minutes in a heat block. The samples were then placed on ice immediately and analysed using the Agilent Technologies 2100 Bioanalyser. The RNA was analysed using the RNA 6000 Nano assay kit (Agilent Technologies) and eukaryote total RNA Nano assay. This assay allows quantification of RNA in the range 25-500 ng/μl, as well as providing information regarding DNA contamination and RNA degradation.

[0292] Reverse transcription was performed using the EndoFree RT™ kit from Ambion. A mixture was prepared containing 1 μg of RNA, 10 pMol anchored oligo(dT) (T₂₀VN, where V=A, C, or G; N=A, C, G, or T), and 10 pMol random hexamers in a total volume of 8 μl. This was denatured at 70° C. for 5 minutes in a heat block. This was then placed immediately on ice for 3 minutes. before being transferred to a PCR machine at 22° C. and equilibrated for 5 minutes. The reaction mixture containing 2 μl each of the following; 10×RT buffer, dCIP (2.5 mM), dTTP (2.5 mM), dGTP. (2.5 mM), dAIP (2.5 mM) and 1 μl of RNase inhibitor (10 U/μl) was also equilibrated at 22° C. for 5 minutes. The 11 μl of reaction mixture was then added to the RNA:RT primer mix at 22° C. Subsequently 1 μl of reverse transcriptase was added to each tube and mixed. The reaction was incubated in a thermal cycler at 22° C. for 10 minutes followed by 2 hours at 49° C.

[0293] The cDNA was then stored at -20° C. prior to quantification by the Agilent Technologies 2100 Bioanalyser. The cDNA was quantified using the Agilent Technologies 2100 Bioanalyser as described for the RNA (above). The only difference in methodology was that the chip was analysed using the eukaryote mRNA Nano assay.

[0294] Quantitative PCR analysis of cDNA: PLATINUM Quantitative PCR SUPERMIX-UDG is used in all amplifications. This mix contains dUTP (instead of dTIP) and UDG (uracil-N-glycosylase, UNG) which removes uracil residues from single or double stranded DNA. Therefore, dU-containing DNA which has been digested with UDG (preliminary incubation of PCR reaction at 50° C. for 2 minutes before cycling) is unable to serve as template in future PCRs, therefore preventing the reamplification of PCR carryover products. At high temperatures (during cycling) UDG is deactivated, therefore allowing amplification of genuine targets.

[0295] Amplification was performed in a BioRad iCycler iQ™ Multi-Colour Real-Time Detection System. Assays were performed for DPP10 (exons 15 to 17) and for □-actin. PCR cycling parameters: A single cycle of 50° C. for 2 minutes then a single cylcle of 95° C. for 10 minutes followed by 95° C. for 30 seconds and 61° C. for 30 seconds for 50 cycles. Samples were then held at 4° C. The oligos used were; β-Actin forward primer: TGCGTGACAITAAGGAGAAG, β-Actin reverse primer: GCTCGTAGCTCTTCTCCA and β-Actin Taqman probe: CACGGCTGCTTCCAGCCCTC {labelled with. FAM and quenched with Black Hole Quencher 1}. The final concentrations of PCR reaction components for the β-Actin assay were as follows; 10 ng CDNA, 125 nM of forward and reverse primer, 150 nM probe, 0.6 units of PLATIUM Taq DNA polymerase, 20 mM Tris-HCl (pH 8.4), 50 mM KCl, 4 mM MgCl₂, 200 M dGTP, 200 μM DATP, 200 μM dCTP, 400 μl dUTP, 0.4 units of UDG and stabilizers. DPP10 forward primer: TTGATGCCAGTTAGTCCC, DPP10 reverse primer: TCAGGATAGCTTCC=TCAGC and DPP10 Taqman probe: AGGGTCCCAGTGGTCAGCCTACATA {labelled with HEX and quenched with Black Hole Quencher 1}. The final concentrations of PCR reaction components for the DPP10 assay were as follows; 10 ng cDNA, 150 nM of forward and reverse primer, 100 nM probe, 0.6 units of PLATNUM Taq DNA polymerase, 20 mM Tris-HCl (pH 8.4), 50 mM KCl, 3 mM MgCl₂, 200 gM dGIP, 200 μM dATP, 200 μM dCTP, 400 μM dUTP, 0.4 units of UDG and stabilizers.

Assaying of DPP10 in Human Serum

[0296] Serum was isolated from four volunteers (WT1-4) using Vacuette sample tubes. Each serum sample was diluted (1/20, 1/40, 1/80) in sample buffer (7.5mM Tris pH6.8, 3.8% SDS, 4M, Urea, 20% glycerol, 5% mercaptoethanol) to a total volume of 20 μl and denatured at 95° C. for 5 minutes. The samples were loaded onto a 12% polyacrylamide SDS denaturing gel and electrophoresed 200V for 60 minutes. After electrophoresis the proteins were transferred to a 0.4pm nitrocellulose membrane by blotting at 200V for 2 hours. The filter was blocked overnight in 5% milk solution at 4° C. prior to antibody detection.

[0297] The affinity purified DPP10 C-terminal antibody was generated against a DPP10 peptide (NH2-CLK-EEI-SVL-PQE-PEE-DE) in rabbits. The filter was incubated with the DPP10 Ab (1/250) in 5% milk at RT for 60 minutes. After washing, the filter was incubated with anti-rabbit IgG conjugated AP (1/2000) in 5% milk at RT for 60 minutes. After a final rigorous washing step, bound antibody was detected by chemiluminescence substrate (Roche) and autoradiography. FIG. 27 shows the result of such a blot demonstrating the presence of DPP10 in human serum.

Discussion

[0298] A 462kb BAC contig was constructed around the asthma associated microsatellite marker D2S308 and sequenced. A number of novel SNPs identified in the region were genotyped across a panel of asthmatic families. IDT testing of association revealed a number of markers with strong association to asthma Genotype data was used to refine the extent of linkage disequilibrium (ID) around the microsatellite marker and the associated SNPs. A block of linkage disequilibrium containing the associated marker sequences was identified in which theasthma susceptibility locus was predicted to lie.

[0299] Examination of the public EST databases did not identify any clones from the region that contained an open reading frame (ORF), or clones that could be extended by 5′ or 3′ RACE. Exon prediction was therefore carried from genomic sequence. Twenty-seven potential exons were identified by at least two exon prediction programs. Exons that were free of repeat sequences and were at least 50bp in length were amplified and used in pools to screen a panel of commercial (Clontech) cDNA libraries (foetal brain, lung, testis, trachea and skeletal muscle).

[0300] Twenty-nine cDNA clones were identified with screening at moderate stringency. Twenty three of these did not contain chromosome 2 sequences. Five other clones consisted of contiguous genomic sequence from our region of interest: they contained no ORFs and were attributed to genomic DNA contamination of the cDNA libraries. One clone, MEX4FB-1, contained a 130lbp insert with a 1137 bp ORF. The clone contained a 60 bp exon (MEX4) that had been predicted by three programs. The full sequence of MEX4 was present at the 5′ end of the ORF. Our exhaustive searching of libraries and 5′ and 3′ RACE experiments with all potential exons, suggests that MEX4FB-1 represents the only gene expressed from the region.

[0301] BLASTN analysis against the Genbank NR database with the MEX4FB-1 sequence identified an overlap between the 3′ end of X4FB-1 and the 5′ end of a partial cDNA clone, KIAA1492. This clone extended a further 3349bp from the 3′ end of MEX4FB-1, and the sequences together encoded a full-length cDNA. Further searches with the full sequence identified an additional clone (AK025075) that contained a 3′poly A tail upstream to that found in KIAA1492. Repeated 3′ RACE experiments in different tissues only identified the AK025075 3′ UTR termination.

[0302] The complete 3.6 Kb cDNA of the gene results in a predicted ORF of 2391 bp, or 796 residues (FIG. 2c). The gene was shown to contain 25 exons by BLASTN analysis against the HTGS database (Altschul, S. F. et al. Gapped BLAST and PSI-BLAST: a new generation of protein database search programs. Nucleic Acids Res 25, 3389402. (1997)). The relative positions of (unfinished) BAC clones containing exons on chromosome-2 (http://genome.ucsc.edu/goldenPath/septTracks.html) suggest that the gene spans more than 1 Mb of genomic DNA.

[0303] In particular the size of intron 1 is large, spanning over 500 kb and containing at least 7 alternate exon 1's (a to f), therefore In-silico gene prediction programmes are unable to identify these exons as potential N-termini to the DPP10 gene. The RACE experiments in this invention establish exons 1a to If as real alternate N-termini of DPP10. Knowledge of these exons as the N-termini of the DPP10 transcripts serves three purposes in this invention. Firstly they enable prediction of the full length open reading frame. In the case of exons 1a and if the start codon is encoded within the exon sequence. Exons 1b, 1c, 1b, 1e and 1g are noncoding, but enable prediction of a start codon in exon 2. Three different DPP10 peptides are predicted in this invention from transcripts 1 to 5. Secondly, these peptide predictions indicate that both membrane bound and cytosolic forms of the protein exist, a proposal subsequently confirmed experimentally with cellular localization experiments using transcripts land 2. Thirdly, the location of alternate exons 1a, 1b and 1c within the associated block of LD containing marker D2S308, serve to tie in the DPP10 gene with a role in the asthma phenotype.

[0304] Northern blots showed the gene to be expressed in a neuro-endocrine manner, with transcripts in brain, pancreas and adrenals (FIG. 13). Lower levels of transcription were observed in trachea and small intestine. Multiple splice variants were visible in the brain and spinal cord.

[0305] Screening of mouse cDNA libraries with the gene isolated a clone (BE862767) which was extended to a full-length cDNA by three rounds of 5′ RACE. The major transcript identified encodes a 2370 bp ORF with a predicted peptide sequence of 789 residues. The mouse sequence is 84% identical at the nucleotide level to the human gene.

Gene Homology

[0306] The MEX4FB-1/KLAA1492 protein is a member of a family of dipeptidyl aminopeptidases (DPPs), so that we have named it as DPP10. The tertiary structure of the gene family is represented by pig prolyl oligopeptidase (Fulop et al (1998) (FIG. 2a). This enzyme consists of two domains. The first is a regulatory.-propeller that funnels small substrates through an internal cavity towards an active site within a second C-terminal.(/hydrolase) catalytic domain.

[0307] β-propeller blades are made up by repeat sequences, sequence similarity between the DPP10 and pig prolyl oligopeptidase repeats (Fulop et al (1998)) is low in the known 3D structure, but can be mapped to the DPP10 sequence. These differences in sequence may provide substrate specificity by the widening or narrowing of the entrance to the β-propeller cavity.

[0308] The second, catalytic, domain in pig prolyl oligopeptidase contains an active site triad: Ser554, Asp641 and His680. DPP10 lacks a serine from this catalytic triad, which is substituted by a glycine residue.

[0309] Dipeptidyl aminopeptidase IV (DPP4) is a closer homolog to DPP10 (Misumi et al (1992)). It is also known as CD26 (Fleischer et al (1994)), and binds proteins including CD45 and adenosine deaminase (ADA) on human T lymphocytes (Kameoka et al (1993)). It, is also constitutively expressed on renal proximal tubular epithelial cells, epithelial cells in the small intestine, and biliary canaliculae (van der Velden (1999)).

[0310] DPP4 has a catalytic activity that removes N-terminal dipeptides sequentially from polypeptides having unsubstituted N-termini, provided that the penultimate residue is proline. Known substrates include stromal cell derived factor-1, and macrophage derived chemokine (Lambeir et al (2001)). DPP4 exists in a soluble version (Durinx et al (2000)), suggesting the possibility of a similar isoform for DPP10. DPP4 forms hetero-dimers with another DPP homologue, FAP which is a cell surface antigen selectively expressed in reactive stromal fibroblasts of epithelial cancers, granulation tissue of healing wounds, and malignant cells of bone and soft tissue sarcomas Scanlan et al (1994)). This suggests that DPP10 may also form hetero or homo-dimers. DPP6 is the closest homolog to DPP10. It was originally isolated from human hippocampus (Yokotani et al (1993)). In common with DPP10, DPP6 lacks a serine from its catalytic triad, due to a substitution by aspartic acid. This substitution is also observed in bovine and rodent DPP6 sequences. A further homologue, Drosophila melanogaster CG9059, also retains aspartic acid and histidine catalytic residues, but like DPP10, has replaced the active site serine with a glycine. The conservation of the catalytic histidine and aspartic acid residues in the absence of the catalytic serine in DPP10 and several homologues suggests an evolutionary constraint and the possible retention of some catalytic function.

[0311] Although there is no evidence for another serine elsewhere in the enzymatic domain that could substitute for the active site serine, it is possible that the catalytic serine might be provided by the substrate (Dall'Acqua et al (2000)). As DPP cleavage takes place only at sites where a penultimate residue is proline, catalytic serines may be provided by substrates which contain a PxS motif with a serine at +2 after the proline at the cleavage point We therefore searched for PxS motifs amongst a redundant list of approximately 1000 human cytokine amino acid sequences from the Entrez database (http://www.ncbi.nlm.nih.gov/entrez). The sequences were filtered using a perl script and the sigcleave module from Bioperl (http://bioperl.org. All sequences with a signal peptide that was 20 amino acids or fewer from the N-terminus and a PxS tripeptide starting at the +2 position were identified. As a control, an identical protocol was used to detect cytokines with an SxP tripeptide at the +2 position, and and none were found. Amongst the sequences containing the PxS motif at the +2 position are several key inflammatory cytokines and chemokines, including SDF-[, IP10, Eotaxin and RANTES (FIG. 19). A mechanism is thus suggested for DPP10 to modulate asthmatic airway and other inflammation by activation of these cytokines. The structure of the DPP10 protein further suggests that small molecules may inhibit its enzymatic activity, so that pharmaceutical targeting of DPP10 will provide a novel means of inhibiting asthmatic airway and other inflammation.

Alternative Splicing and Gene Expression

[0312] 5′ RACE was performed using primers within exon III of DPP10. Five different N-termini were identified. The corresponding cDNAs were designated 1 to 5. These contained seven different exons, designated 1a to 1g (FIG. 6). Transcripts 1-3 were isolated from brain and foetal brain cDNA and 4 and 5 were isolated from pancreas. Exons 1a and 1f (transcripts 1 and 4) provide alternate N-terminal coding sequences, 23 residues upstream of the start of exon 2. The other N-terminal exons are non-coding and the next available initiation codon is within exon 2. Therefore three predicted proteins are encoded by these five transcripts. Two of thesde initiated within exon 1a and exon If, contain a trans-membrane region, suggesting that the majority of the protein will be located in the cytosol.

[0313] 3′ RACE from exon 1a identified an alternate exon 2 (2a), which is 6655bp downstream of the 1a exon (FIG. 6). This transcript was identified in cDNA from brain and testis, and encodes a 47 residue peptide. Alternative splicing between this “stopper” exon and exon 2 and the rest of the gene offers a potential mechanism for regulating the membrane expression of the complete gene product.

[0314] We then positioned these alternate early exons on the LD map of the region. Associations with the total serum IgE level mapped to the A island of LD, close to exon 1a The two markers showing the strongest association to asthma were located at the beginning of the B LD island, in close proximity to the 2a stopper exon. Weaker associations to asthma were seen near exons 1b and lc. Other exons are outside of the region of association.

[0315] No coding polymorphisms were found in any exons, and we typed all SNPs in <100 Kb proximity to any coding sequences. Genetic effects at this locus may therefore be attributed to the actions of polymorphism on alternative splicing between membrane bound and other forms of the protein. Similar effects have been observed with the mapping of distinct asthma-associated traits to individual polymorphisms that affect splicing of the IL4-receptor gene (Ober et al (2000) and Knife et al (1999) and Kruse et al (1999).

Protease Assay

[0316] DPP10, either purified from expression systems or from cell lystes is incubated with peptides to be tested as putative substrates e.g. chemokines such as RANTES, eotaxin. At varying time intervals, samples are withdrawn and quenched in TCA. The samples are then desalted, eluted and the composition of the mixture identified with a mass spectrometer. An example of such a procedure can be found in Lambeir et al. 2001 J. Biol Chem 276, 29389-29845.

Cell Adhesion Assay

[0317] To address whether fill length DPP10 protein is involved in cell adhesion, cell-cell adhesion assay (Gee B. E. and Platt O. S. 1995 Sickle Reticulocyes adhere to VCAM-1. Blood 85(1):268-274.) and Rosetting assay (DeRose V. et al. 1994 Substance P increases neutrophil adhesion to bronchial epithelial cells. J. Immunol. 152(3):1339-1346; Walsh G. M. et al. 1991 Human eosinophil, but not neutrophil, adherence to IL-1-stimulated human umbilical vascular endothelial cells is a4p1 (very late antigen4) dependent. J. Immunol. 146(10):3419-3423) is performed. In brief, HeLa or COS cells are transfected with pcDNA3.1V5-His-DPP10(full) using Lipofectamine as transfection reagent. After 2 days gene expression, for cell-cell adhesion assay, the cells are be incubated with leukocytes with occasional rotation. Unbound cells are washed away before fixation, and then followed by immunostaining. The cell binding is determined under microscope. For Rosetting assay, after gene expression, the cells are detached by trypsine/EDTA. The cell suspension are mixed with leukocytes. After incubation, the cells are fixed onto glass slides followed by staining. The rosette is scored under microscope.

[0318] Cellular signalling/activation assays (for example Lymphocyte immunoreaction). To understand how DPP10 protein is directly involved in lymphocyte immunoresponse, following points are addressed:
[0319] 1) Is DPP10 level regulated by the physiological condition of lymphocytes? Primary T- and B-cells which have been confirmed to be DPP10 positive, and DPP10 positive T-cell lines are immunostimulated and used for this study. DPP10 level is compared between resting and active form of these cells with quantitative rtPCR.
[0320] 2) Does DPPlO expression affect lymphocyte immunoresponse? DPP10 is overexpressed in DPP10 negative T-cell (may be also B-cell) lines by transfection with pcDNA3.1/V5-His-DPP10(full) or pcDNA3.1/V5-His-DPP10(Tpt2). After gene expression, the cells are immunostimulated. The intensity of the immunoresponse is compared between DPP10 overexpressed cells and control cells using cytokine assay or proliferation assay.
[0321] 3) How is DPP10 involved in lymphocyte immunoresponse? Lymphocytes are transfected with pcDNA3.1/V5-His-DPPlO(full) or pcDNA3.1/V5-His-DPP10(Tpt2). The effect of DPP10 overexpression on different signal transduction pathways, such as P1-3K, ERK, Jak/Stat and NFκB pathways, is noted with Western blot, in vitro assays.

The application's sequence listing, which the Patent Office published only in electronic form, follows.

SEQUENCE LISTING (421 sequences)

SEQ ID NO: 1 - DNA, 53 bp, Homo sapiens
ccattctctttgtttttattcgggatgctcttatttccaagaaggcttataaa

SEQ ID NO: 2 - protein, 4 aa, Homo sapiens
  misc_feature (1)..(1): Xaa is any amino acid
  misc_feature (3)..(3): Xaa is any amino acid
XPXS

SEQ ID NO: 3 - DNA, 18 bp, Artificial Sequence
  Primer
tccgagatctggacgagc

SEQ ID NO: 4 - DNA, 20 bp, Artificial Sequence
  Primer
taatacgactcactataggg

SEQ ID NO: 5 - DNA, 22 bp, Artificial Sequence
  Primer
tttgtgcttcacgatccagagg

SEQ ID NO: 6 - DNA, 22 bp, Artificial Sequence
  Primer
gatgtcagtcgcaatgaactgc

SEQ ID NO: 7 - DNA, 21 bp, Artificial Sequence
  Primer
aaccaaactgccagcgtgtcc

SEQ ID NO: 8 - DNA, 23 bp, Artificial Sequence
  Primer
aagacggagtcctctacttctgg

SEQ ID NO: 9 - DNA, 24 bp, Artificial Sequence
  Primer
atggaccaactcacactttggagc

SEQ ID NO: 10 - DNA, 23 bp, Artificial Sequence
  Primer
tcattgatccaccgagcctctgg

SEQ ID NO: 11 - DNA, 23 bp, Artificial Sequence
  Primer
accgagcctctggatcgtgaagc

SEQ ID NO: 12 - DNA, 21 bp, Artificial Sequence
  Primer
gctcactcatcactatgtcag

SEQ ID NO: 13 - DNA, 24 bp, Artificial Sequence
  Primer
agtctgtgagaccactacaggtgc

SEQ ID NO: 14 - DNA, 23 bp, Artificial Sequence
  Primer
tgagatgacatcagatacgtggc

SEQ ID NO: 15 - DNA, 23 bp, Artificial Sequence
  Primer
ggaacttatctgtaaccagctgg

SEQ ID NO: 16 - DNA, 25 bp, Artificial Sequence
  Primer
cttgattgtttttgagggttgacac

SEQ ID NO: 17 - DNA, 24 bp, Artificial Sequence
  Primer
gtgagaactccacttaaggatgcc

SEQ ID NO: 18 - DNA, 21 bp, Artificial Sequence
  Primer
aaccaaactgccagcgtgtcc

SEQ ID NO: 19 - DNA, 24 bp, Artificial Sequence
  Primer
gtcccatcacatcaagtgtcaacc

SEQ ID NO: 20 - DNA, 23 bp, Artificial Sequence
  Primer
tgctgccatccgtaaattggagg

SEQ ID NO: 21 - DNA, 22 bp, Artificial Sequence
  Primer
tggagctggtatgctggttagg

SEQ ID NO: 22 - DNA, 283 bp, Homo sapiens
taaacatacattttaattttgtttccaaactagagaatactatatcactatggttaaatgggtaagcaataccaagactgtggtaagatggttaaaccgasctcagaacatctccatcctcacagtctgtgagaccactacaggtgcttgtagtaaagtgagtataatttatttttcttttatgcctaaaatgaagtagcttatgcagctttacaaaggggaaacaggaaatgctttgtacaaaaaaaattcagtgtttaacttttaaaactaataggaaaag

SEQ ID NO: 23 - DNA, 20 bp, Artificial Sequence
  Primer
tgcgtgacattaaggagaag

SEQ ID NO: 24 - DNA, 18 bp, Artificial Sequence
  Primer
gctcgtagctcttctcca

SEQ ID NO: 25 - DNA, 21 bp, Artificial Sequence
  Primer
cacggctgcttccagctcctc

SEQ ID NO: 26 - DNA, 20 bp, Artificial Sequence
  Primer
ttgatgccagttttagtccc

SEQ ID NO: 27 - DNA, 20 bp, Artificial Sequence
  Primer
tcaggatagcttccttcagc

SEQ ID NO: 28 - DNA, 25 bp, Artificial Sequence
  Primer
agggtcccagtggtcagcctacata

SEQ ID NO: 29 - protein, 17 aa, Artificial Sequence
  Synthetic peptide
CLKEEISVLPQEPEEDE

SEQ ID NO: 30 - DNA, 60 bp, Homo sapiens
atgaaccaaactgccagcgtgtcccatcacatcaagtgtcaaccctcaaaaacaatcaag

SEQ ID NO: 31 - DNA, 1301 bp, Homo Spaiens
ctccggagtgaggaagcagcagaaacagaagcagcagaagcaacagcagtagcagcggcagcagcaacagcagcagcccctactgaagtccaatagaggagacttgatctctagttcattctggaactccgcctgggattgtgcactgtccagggtcctgaaacatgaaccaaactgccagcgtgtcccatcacatcaagtgtcaaccctcaaaaacaatcaaggaactgggaagtaacagccctccacagagaaactggaagggaattgctattgctctgctggtgattttagttgtatgctcactcatcactatgtcagtcatcctcttaaccccagatgaactcacaaattcgtcagaaaccagattgtctttggaagacctctttaggaaagactttgtgcttcacgatccagaggctcggtggatcaatgatacagatgtggtgtataaaagcgagaatggacatgtcattaaactgaatatagaaacaaatgctaccacattattattggaaaacacaacttttgtaaccttcaaagcatcaagacattcagtttcaccagatttaaaatatgtccttctggcatatgatgtcaaacagatttttcattattcgtatactgcttcatatgtgatttacaacatacacactagggaagtttgggagttaaatcctccagaagtagaggactccgtcttgcagtacgcggcctggggtgtccaagggcagcagctgatttatatttttgaaaataatatctactatcaacctgatataaagagcagttcattgcgactgacatcttctggaaaagaagaaataatttttaatgggattgctgactggttatatgaagaggaactcctgcattctcacatcgcccactggtggtcaccagatggagaaagacttgccttcctgatgataaatgactctttggtacccaccatggttatccctcggtttactggagcgttgtatcccaaaggaaagcagtatccgtatcctaaggcaggtcaagtgaacccaacaataaaattatatgttgtaaacctgtatggaccaactcacactttggagctcatgccacctgacagctttaaatcaagagaatactatatcactatggttaaatgggtaagcaataccaagactgtggtaagatggttaaaccgacctcagaacatctccatcctcacagtctgtgagaccactacaggtgcttgtagtaaaaaatatgagatgacatcagatacgtggctctctcagcagaatgaggagcccgtgttttctaga

SEQ ID NO: 32 - protein, 380 aa, Homo spaiens
NMNQTASVSHHIKCQPSKTIKELGSNSPPQRNWKGIAIALLVILVVCSLITMSVILLTPDELTNSSETRLSLEDLFRKDFVLHDPEARWINDTDVVYKSENGHVIKLNIETNATTLLLENTTFVTFKASRHSVSPDLKYVLLAYDVKQIFHYSYTASYVIYNIHTREVWELNPPEVEDSVLQYAAWGVQGQQLIYIFENNIYYQPDIKSSSLRLTSSGKEEIIFNGIADWLYEEELLHSHIAHWWSPDGERLAFLMINDSLVPTMVIPRFTGALYPKGKQYPYPKAGQVNPTIKLYVVNLYGPTHTLELMPPDSFKSREYYITMVKWVSNTKTVVRWLNRPQNISILTVCETTTGACSKKYEMTSDTWLSQQNEEPVFSR

SEQ ID NO: 33 - DNA, 2317 bp, Homo sapiens
tgagatgacatcagatacgtggctctctcagcagaatgaggagcccgtgttttctagagacggcagcaaattctttatgacagtgcctgttaagcaagggggacgtggagaatttcaccacatagctatgttcctcatccagagtaaaagtgagcaaattaccgtgcggcatctgacatcaggaaactgggaagtgataaagatcttggcatacgatgaaactactcaaaaaatttactttctgagcactgaatcttctcccagaggaaggcagctgtacagtgcttctactgaaggattattgaatcgccaatgcatttcatgtaatttcatgaaagaacaatgtacatattttgatgccagttttagtcccatgaatcaacatttcttattattctgtgaaggtccaagggtcccagtggtcagcctacatagtacggacaacccagcaaaatattttatattggaaagcaattctatgctgaaggaagctatcctgaagaagaagataggaaagccagaaattaaaatccttcatattgacgactatgaacttcctttacagttgtcccttcccaaagattttatggaccgaaaccagtatgctcttctgttaataatggatgaagaaccaggaggccagctggttacagataagttccatattgactgggattccgtactcattgacatggataatgtcattgtagcaagatttgatggcagaggaagtggattccagggtctgaaaattttgcaggagattcatcgaagattaggttcagtagaagtaaaggaccaaataacagctgtgaaatttttgctgaaactgccttacattgactccaaaagattaagcatttttggaaagggttatggtggctatattgcatcaatgatcttaaaatcagatgaaaagctttttaaatgtggatccgtggttgcacctatcacagacttgaaattgtatgcctcagctttctctgaaagataccttgggatgccatctaaggaagaaagcacttaccaggcagccagtgtgctacataatgttcatggcttgaaagaagaaaatatattaataattcatggaactgctgacacaaaagttcatttccaacactcagcagaattaatcaagcacctaataaaagctggagtgaattatactatgcaggtctacccagatgaaggtcataacgtatctgagaagagcaagtatcatctctacagcacaatcctcaaattcttcagtgattgtttgaaggaagaaatatctgtgctaccacaggaaccagaagaagatgaataatggaccgtatttatacagaactgaagggaatattgaggctcaatgaaacctgacaaagagactgtaatattgtagttgctccagaatgtcaagggcagcttacggagatgtcactggagcagcacgctcagagacagtgaactagcatttgaatacacaagtccaagtctactgtgttgctaggggtgcagaacccgtttctttgtatgagagaggtcaaagggttggtttcctgggagaaattagttttgcattaaagtaggagtagtgcatgttttcttctgttatccccctgtttgttctgtaactagttgctctcattttaatttcactggccaccatcatctttgcatataatgcacaatctatcatctgtcctacagtccctgatctttcatggctgagctgcaatctaacactttactgtacctttataataagtgcaattctttcattgtctattattatgcttaagaaaatattcagttaataaaaaacagagtattttatgtaatttctgtttttaaaaagacattattaaatgggtcaaaggacatatagaaatgtggatttcagcaccttccaaagttcagccagttatcagtagatacaatatctttaaatgaacacacgagtgtatgtctcacaatatatatacacaagtgtgcatatacagttaatgaaactatctttaaatgttattcatgctataaagagtaaacgtttgatgaattagaagagatgctcttttccaagctataatggatgctttgtttaatgagccaaatatgatgaaacattttttccaattcaaattctagctattgctttcctataaatgtttgggttgtgtttggtattgtttttagtggttaatagttttccagttgcatttaattttttgaatatgataccttgtcacatgtaaattagatacttaaatattaaattatagtttctgataaagaaattttgttaacaatgcaaaaaaaaaaaaaaaaaaaa

SEQ ID NO: 34 - protein, 776 aa, Homo sapiens
NMNQTASVSHHIKCQPSKTIKELGSNSPPQRNWKGIAIALLVILVVCSLITMSVILLTPDELTNSSETRLSLEDLFRKDFVLHDPEARWINDTDVVYKSENGHVIKLNIETNATTLLLENTTFVTFKASRHSVSPDLKYVLLAYDVKQIFHYSYTASYVIYNIHTREVWELNPPEVEDSVLQYAAWGVQGQQLIYIFENNIYYQPDIKSSSLRLTSSGKEEIIFNGIADWLYEEELLHSHIAHWWSPDGERLAFLMINDSLVPTMVIQVNPTIKLYVVNLYGPTHTLELMPPDSFKSREYYITMVKWVSNTKTVVRWLNRPQNISILTVCETTTGACSKKYEMTSDTWLSQQNEEPVFSRDGSKFFMTVPVKQGGRGEFHHIAMFLIQSKSEQITVRHLTSGNWEVIKILAYDETTQKIYFLSTESSPRGRQLYSASTEGLLNRQCISCNFMKEQCTYFDASFSPMNQHFLLFCEGPRVPVVSLHSTDNPAKYFILESNSMLKEAILKKKIGKPEIKILHIDDYELPLQLSLPKDFMDRNQYALLLIMDEEPGGQLVTDKFHIDWDSVLIDMDNVIVARFDGRGSGFQGLKILQEIHRRLGSVEVKDQITAVKFLLKLPYIDSKRLSIFGKGYGGYIASMILKSDEKLFKCGSVVAPITDLKLYASAFSERYLGMPSKEESTYQAASVLHNVHGLKEENILIIHGTADTKVHFQHSAELIKHLIKAGVNYTMQVYPDEGHNVSEKSKHLYSTILKFFSDCLKEEISVLPQEPEEDE

SEQ ID NO: 35 - DNA, 3549 bp, Homo sapiens
  CDS (162)..(2552)
ctccggagtgaggaagcagcagaaacagaagcagcagaagcaacagcagtagcagcggcagcagcaacagcagcagcccctactgaagtccaatagaggagacttgatctctagttcattctggaactccgcctgggattgtgcactgtccagggtcctgaaacatgaaccaaactgccagcgtgtcccatcacatcaagtgtcaaccctcaaaaacaatcaaggaactgggaagtaacagccctccacagagaaactggaagggaattgctattgctctgctggtgattttagttgtatgctcactcatcactatgtcagtcatcctcttaaccccagatgaactcacaaattcgtcagaaaccagattgtctttggaagacctctttaggaaagactttgtgcttcacgatccagaggctcggtggatcaatgatacagatgtggtgtataaaagcgagaatggacatgtcattaaactgaatatagaaacaaatgctaccacattattattggaaaacacaacttttgtaaccttcaaagcatcaagacattcagtttcaccagatttaaaatatgtccttctggcatatgatgtcaaacagatttttcattattcgtatactgcttcatatgtgatttacaacatacacactagggaagtttgggagttaaatcctccagaagtagaggactccgtcttgcagtacgcggcctggggtgtccaagggcagcagctgatttatatttttgaaaataatatctactatcaacctgatataaagagcagttcattgcgactgacatcttctggaaaagaagaaataatttttaatgggattgctgactggttatatgaagaggaactcctgcattctcacatcgcccactggtggtcaccagatggagaaagacttgccttcctgatgataaatgactctttggtacccaccatggttatccctcggtttactggagcgttgtatcccaaaggaaagcagtatccgtatcctaaggcaggtcaagtgaacccaacaataaaattatatgttgtaaacctgtatggaccaactcacactttggagctcatgccacctgacagctttaaatcaagagaatactatatcactatggttaaatgggtaagcaataccaagactgtggtaagatggttaaaccgacctcagaacatctccatcctcacagtctgtgagaccactacaggtgcttgtagtaaaaaatatgagatgacatcagatacgtggctctctcagcagaatgaggagcccgtgttttctagagacggcagcaaattctttatgacagtgcctgttaagcaagggggacgtggagaatttcaccacatagctatgttcctcatccagagtaaaagtgagcaaattaccgtgcggcatctgacatcaggaaactgggaagtgataaagatcttggcatacgatgaaactactcaaaaaatttactttctgagcactgaatcttctcccagaggaaggcagctgtacagtgcttctactgaaggattattgaatcgccaatgcatttcatgtaatttcatgaaagaacaatgtacatattttgatgccagttttagtcccatgaatcaacatttcttattattctgtgaaggtccaagggtcccagtggtcagcctacatagtacggacaacccagcaaaatattttatattggaaagcaattctatgctgaaggaagctatcctgaagaagaagataggaaagccagaaattaaaatccttcatattgacgactatgaacttcctttacagttgtcccttcccaaagattttatggaccgaaaccagtatgctcttctgttaataatggatgaagaaccaggaggccagctggttacagataagttccatattgactgggattccgtactcattgacatggataatgtcattgtagcaagatttgatggcagaggaagtggattccagggtctgaaaattttgcaggagattcatcgaagattaggttcagtagaagtaaaggaccaaataacagctgtgaaatttttgctgaaactgccttacattgactccaaaagattaagcatttttggaaagggttatggtggctatattgcatcaatgatcttaaaatcagatgaaaagctttttaaatgtggatccgtggttgcacctatcacagacttgaaattgtatgcctcagctttctctgaaagataccttgggatgccatctaaggaagaaagcacttaccaggcagccagtgtgctacataatgttcatggcttgaaagaagaaaatatattaataattcatggaactgctgacacaaaagttcatttccaacactcagcagaattaatcaagcacctaataaaagctggagtgaattatactatgcaggtctacccagatgaaggtcataacgtatctgagaagagcaagtatcatctctacagcacaatcctcaaattcttcagtgattgtttgaaggaagaaatatctgtgctaccacaggaaccagaagaagatgaataatggaccgtatttatacagaactgaagggaatattgaggctcaatgaaacctgacaaagagactgtaatattgtagttgctccagaatgtcaagggcagcttacggagatgtcactggagcagcacgctcagagacagtgaactagcatttgaatacacaagtccaagtctactgtgttgctaggggtgcagaacccgtttctttgtatgagagaggtcaaagggttggtttcctgggagaaattagttttgcattaaagtaggagtagtgcatgttttcttctgttatccccctgtttgttctgtaactagttgctctcattttaatttcactggccaccatcatctttgcatataatgcacaatctatcatctgtcctacagtccctgatctttcatggctgagctgcaatctaacactttactgtacctttataataagtgcaattctttcattgtctattattgtgcttaagaaaatattcagttaataaaaaacagagtattttatgtaatttctgtttttaaaaagacattattaaatgggtcaaaggacatatagaaatgtggatttcagcaccttccaaagttcagccagttatcagtagatacaatatctttaaatgaacacacgagtgtatgtctcacaatatatatacacaagtgtgcatatacagttaatgaaatatctttaaatgttattcatgctataaagagtaaacgtttgatgaattagaagagatgctcttttccaagctataatggatgctttgtttaatgagccaaatatgatgaaacattttttccaattcaaattctagctattgctttcctataaatgtttgggttgtgtttggtattgtttttagtggttaatagttttccagttgcatttaattttttgaatatgataccttgtcacatgtaaattagatacttaaatattaaattatagtttctgataaagaaattttgttaacaatgcaaaaaaaaaa

SEQ ID NO: 36 - protein, 797 aa, Homo sapiens
NMNQTASVSHHIKCQPSKTIKELGSNSPPQRNWKGIAIALLVILVVCSLITMSVILLTPDELTNSSETRLSLEDLFRKDFVLHDPEARWINDTDVVYKSENGHVIKLNIETNATTLLLENTTFVTFKASRHSVSPDLKYVLLAYDVKQIFHYSYTASYVIYNIHTREVWELNPPEVEDSVLQYAAWGVQGQQLIYIFENNIYYQPDIKSSSLRLTSSGKEEIIFNGIADWLYEEELLHSHIAHWWSPDGERLAFLMINDSLVPTMVIPRFTGALYPKGKQYPYPKAGQVNPTIKLYVVNLYGPTHTLELMPPDSFKSREYYITMVKWVSNTKTVVRWLNRPQNISILTVCETTTGACSKKYEMTSDTWLSQQNEEPVFSRDGSKFFMTVPVKQGGRGEFHHIAMFLIQSKSEQITVRHLTSGNWEVIKILAYDETTQKIYFLSTESSPRGRQLYSASTEGLLNRQCISCNFMKEQCTYFDASFSPMNQHFLLFCEGPRVPVVSLHSTDNPAKYFILESNSMLKEAILKKKIGKPEIKILHIDDYELPLQLSLPKDFMDRNQYALLLIMDEEPGGQLVTDKFHIDWDSVLIDMDNVIVARFDGRGSGFQGLKILQEIHRRLGSVEVKDQITAVKFLLKLPYIDSKRLSIFGKGYGGYIASMILKSDEKLFKCGSVVAPITDLKLYASAFSERYLGMPSKEESTYQAASVLHNVHGLKEENILIIHGTADTKVHFQHSAELIKHLIKAGVNYTMQVYPDEGHNVSEKSKYHLYSTILKFFSDCLKEEISVLPQEPEEDE

SEQ ID NO: 37 - DNA, 2909 bp, Mus musculus
  CDS (251)..(2641)
ctttctatcccatattgccaagagctctgagaatgatgaaccaagtaaatgctttatttagggctaagtgagctgcggatccctccagcctgacagcgtttcagcctgcagagtaagacagcagcagcaacagaagcagcagaggcagcagcaacagcagcagccccttgctcaagtccagcaggggagacttgatctctggttagtcttggaactcagcctgtggatcgtgcactgtccagggtcctgaaatatgaaccaaacagccagcgtgtcccatcacatcaagtgtcagccctccaagaccatcaaggaactaggaagtaacagccctccacaaagaaactggaagggaatcgccattgccctgctggtgatcttggtggtatgctcactcatcacaatgtctgtcatcctgttaacaccagatgaactaacaaattcttcagaaacaagactgtcactagaggagcttttggggaaaggatttggacttcataatccagaagctcggaggatcaatgatacagtcgttgtatataaaaccaacaatggacacgtcatgaaactgaatacagaatcaaatgcttccacattgttattggacaactcaacttttgtaacgtttaaagcctccagacactcactttccccagatttaaagtatgttctcctggcatacgacgtcaagcagatttttcattactcatttaccgcttcatatttgatttacaacatacacactggggaagtgtgggagttgaatcccccagaagttgaggactcagtgttgcagtatgcggcctggggtgtgcaaggacagcagctgatttatatttttgaaaacaatatctactatcaacctgatatcaagagcagttctttacgactaacatcttcaggaaaggaaggcattatttttaatgggattgctgactggttatatgaagaagaacttctgcattctcatatcgcccactggtggtcccccgatggagagagacttgccttcctgatgataaatgactcgttggtgcctaacatgatcatacctcggtttactggagcactgtaccccaaagcaaagcagtacccataccccaaggcaggtcaagcgaacccatcagtgaagttatatgttgtaaacctgtatggaccaactcatactttggagctgatgccacccgacatttttaaatcaagagaatattacatcaccatggttaaatgggtgagcaacacgaggacagtggtcaggtggttgaataggcctcagaacatctccatcctcacactctgtgaatctaccaccggggcatgcagcaggaaatatgagatgacgtccgacacctggctctctaaacagaacgaggagccagtgttttccagagatggaagcaagttctycatgactgttcttgttaaacaaggtggaagaggagaattccaccacatagctatgttcctggtccagagtaaaagtgagcaaattacggtgcggcatctgacatcaggaaactgggaagtgataaggatcttggcctatgatgaaacaactcaaaaaatttactttctgagcacagaatcttctccccaagggaggcaactatacagtgcttctactgagggactattgaatcgtgattgcatctcatgcaactttatgaaagaagattgcacgtattttgatgccagctttagccccatgaatcagcatttcttgttattctgtgaaggtccaaaggtcccagtggtcagccttcacatcacagacaacccatcaaggtatttcctcttggaaaacaattctgtgatgaaagaaactattcagaagaagaagctcgcaaagagagagactagaatacttcacattgatgactatgaacttcctttacagttgtcctttcccaaagattttatggagaaaaaccagtatgctcttctattaataatggatgaagaaccaggaggccaaatggtgacagataagttccatgttgactgggattcagttcttattgacaccgataatgtcattgtagcaagatttgatggcagaggaagtggattccagggcctgaaagttttgcaggagattcacagaaggataggctcagtggaggcaaaggaccaagtagctgctgtaaaatatttactgaaacagccatatattgactccaaaagattaagcatttttggaaagggatatgggggctatatcgcatcaatgatcttaaaatcagatgagaagtttttcaaatgtggagccgtggttgcacccatctcagacatgaagttgtatgcctcagctttctctgaacggtaccttggcatgccatcaaaggaagaaagcacttaccaggcatccagtgtactgcataacattcatggtttaaaagaagaaaatttattaataattcacggaactgctgatacaaaagttcatttccagcattcagcagaattgatcaagcatctgataaaagctggggtgaattacactctgcaggtctatccagatgaaggatatcacatttcagacaagagcaagcatcatttttacagcacaattctcagattcttcagtgattgtctaaaggaagaggtatctgtgctgccacaggaaccagaagaagatgaataatggactacacttatacagagctgaagggaatattgaggctcaatgaaactgaaccaagagactgtcttgttgtagacgctccagaattctaagggcagcttgaggagataaacctggaacagcacactcagacagtgaactagaccttggagacagacatccacactactgtgctgccaagggtgcagaaggtgtttcattgtaaagggaagttgcaagggttggtttcctgggggaaaaaaaattagtttcacattaaagtagg

SEQ ID NO: 38 - protein, 797 aa, Mus musculus
  misc_feature (386)..(386): The 'Xaa' at location 386 stands for Ser, or Phe.
NMNQTASVSHHIKCQPSKTIKELGSNSPPQRNWKGIAIALLVILVVCSLITMSVILLTPDELTNSSETRLSLEELLGKGFGLHNPEARRINDTVVVYKTNNGHVMKLNTESNASTLLLDNSTFVTFKASRHSLSPDLKYVLLAYDVKQIFHYSFTASYLIYNIHTGEVWELNPPEVEDSVLQYAAWGVQGQQLIYIFENNIYYQPDIKSSSLRLTSSGKEGIIFNGIADWLYEEELLHSHIAHWWSPDGERLAFLMINDSLVPNMIIPRFTGALYPKAKQYPYPKAGQANPSVKLYVVNLYGPTHTLELMPPDIFKSREYYITMVKWVSNTRTVVRWLNRPQNISILTLCESTTGACSRKYEMTSDTWLSKQNEEPVFSRDGSKFXMTVLVKQGGRGEFHHIAMFLVQSKSEQITVRHLTSGNWEVIRILAYDETTQKIYFLSTESSPQGRQLYSASTEGLLNRDCISCNFMKEDCTYFDASFSPMNQHFLLFCEGPKVPVVSLHITDNPSRYFLLENNSVMKETIQKKKLAKRETRILHIDDYELPLQLSFPKDFMEKNQYALLLIMDEEPGGQMVTDKFHVDWDSVLIDTDNVIVARFDGRGSGFQGLKVLQEIHRRIGSVEAKDQVAAVKYLLKQPYIDSKRLSIFGKGYGGYIASMILKSDEKFFKCGAVVAPISDMKLYASAFSERYLGMPSKEESTYQASSVLHNIHGLKEENLLIIHGTADTKVHFQHSAELIKHLIKAGVNYTLQVYPDEGYHISDKSKHHFYSTILRFFSDCLKEEVSVLPQEPEEDE

SEQ ID NO: 39 - DNA, 2909 bp, Mus musculus
cctactttaatgtgaaactaattttttttcccccaggaaaccaacccttgcaacttccctttacaatgaaacaccttctgcacccttggcagcacagtagtgtggatgtctgtctccaaggtctagttcactgtctgagtgtgctgttccaggtttatctcctcaagctgcccttagaattctggagcgtctacaacaagacagtctcttggttcagtttcattgagcctcaatattcccttcagctctgtataagtgtagtccattattcatcttcttctggttcctgtggcagcacagatacctcttcctttagacaatcactgaagaatctgagaattgtgctgtaaaaatgatgcttgctcttgtctgaaatgtgatatccttcatctggatagacctgcagagtgtaattcaccccagcttttatcagatgcttgatcaattctgctgaatgctggaaatgaacttttgtatcagcagttccgtgaattattaataaattttcttcttttaaaccatgaatgttatgcagtacactggatgcctggtaagtgctttcttcctttgatggcatgccaaggtaccgttcagagaaagctgaggcatacaacttcatgtctgagatgggtgcaaccacggctccacatttgaaaaacttctcatctgattttaagatcattgatgcgatatagcccccatatccctttccaaaaatgcttaatcttttggagtcaatatatggctgtttcagtaaatattttacagcagctacttggtcctttgcctccactgagcctatccttctgtgaatctcctgcaaaactttcaggccctggaatccacttcctctgccatcaaatcttgctacaatgacattatcggtgtcaataagaactgaatcccagtcaacatggaacttatctgtcaccatttggcctcctggttcttcatccattattaatagaagagcatactggtttttctccataaaatctttgggaaaggacaactgtaaaggaagttcatagtcatcaatgtgaagtattctagtctctctctttgcgagcttcttcttctgaatagtttctttcatcacagaattgttttccaagaggaaataccttgatgggttgtctgtgatgtgaaggctgaccactgggacctttggaccttcacagaataacaagaaatgctgattcatggggctaaagctggcatcaaaatacgtgcaatcttctttcataaagttgcatgagatgcaatcacgattcaatagtccctcagtagaagcactgtatagttgcctcccttggggagaagattctgtgctcagaaagtaaattttttgagttgtttcatcataggccaagatccttatcacttcccagtttcctgatgtcagatgccgcaccgtaatttgctcacttttactctggaccaggaacatagctatgtggtggaattctcctcttccaccttgtttaacaagaacagtcatgragaacttgcttccatctctggaaaacactggctcctcgttctgtttagagagccaggtgtcggacgtcatctcatatttcctgctgcatgccccggtggtagattcacagagtgtgaggatggagatgttctgaggcctattcaaccacctgaccactgtcctcgtgttgctcacccatttaaccatggtgatgtaatattctcttgatttaaaaatgtcgggtggcatcagctccaaagtatgagttggtccatacaggtttacaacatataacttcactgatgggttcgcttgacctgccttggggtatgggtactgctttgctttggggtacagtgctccagtaaaccgaggtatgatcatgttaggcaccaacgagtcatttatcatcaggaaggcaagtctctctccatcgggggaccaccagtgggcgatatgagaatgcagaagttcttcttcatataaccagtcagcaatcccattaaaaataatgccttcctttcctgaagatgttagtcgtaaagaactgctcttgatatcaggttgatagtagatattgttttcaaaaatataaatcagctgctgtccttgcacaccccaggccgcatactgcaacactgagtcctcaacttctgggggattcaactcccacacttccccagtgtgtatgttgtaaatcaaatatgaagcggtaaatgagtaatgaaaaatctgcttgacgtcgtatgccaggagaacatactttaaatctggggaaagtgagtgtctggaggctttaaacgttacaaaagttgagttgtccaataacaatgtggaagcatttgattctgtattcagtttcatgacgtgtccattgttggttttatatacaacgactgtatcattgatcctccgagcttctggattatgaagtccaaatcctttccccaaaagctcctctagtgacagtcttgtttctgaagaatttgttagttcatctggtgttaacaggatgacagacattgtgatgagtgagcataccaccaagatcaccagcagggcaatggcgattcccttccagtttctttgtggagggctgttacttcctagttccttgatggtcttggagggctgacacttgatgtgatgggacacgctggctgtttggttcatatttcaggaccctggacagtgcacgatccacaggctgagttccaagactaaccagagatcaagtctcccctgctggacttgagcaaggggctgctgctgttgctgctgcctctgctgcttctgttgctgctgctgtcttactctgcaggctgaaacgctgtcaggctggagggatccgcagctcacttagccctaaataaagcatttacttggttcatcattctcagagctcttggcaatatgggatagaaag

SEQ ID NO: 40 - DNA, 2391 bp, Mus musculus
  CDS (1)..(2388)
atgaaccaaacagccagcgtgtcccatcacatcaagtgtcagccctccaagaccatcaaggaactaggaagtaacagccctccacaaagaaactggaagggaatcgccattgccctgctggtgatcttggtggtatgctcactcatcacaatgtctgtcatcctgttaacaccagatgaactaacaaattcttcagaaacaagactgtcactagaggagcttttggggaaaggatttggacttcataatccagaagctcggaggatcaatgatacagtcgttgtatataaaaccaacaatggacacgtcatgaaactgaatacagaatcaaatgcttccacattgttattggacaactcaacttttgtaacgtttaaagcctccagacactcactttccccagatttaaagtatgttctcctggcatacgacgtcaagcagatttttcattactcatttaccgcttcatatttgatttacaacatacacactggggaagtgtgggagttgaatcccccagaagttgaggactcagtgttgcagtatgcggcctggggtgtgcaaggacagcagctgatttatatttttgaaaacaatatctactatcaacctgatatcaagagcagttctttacgactaacatcttcaggaaaggaaggcattatttttaatgggattgctgactggttatatgaagaagaacttctgcattctcatatcgcccactggtggtcccccgatggagagagacttgccttcctgatgataaatgactcgttggtgcctaacatgatcatacctcggtttactggagcactgtaccccaaagcaaagcagtacccataccccaaggcaggtcaagcgaacccatcagtgaagttatatgttgtaaacctgtatggaccaactcatactttggagctgatgccacccgacatttttaaatcaagagaatattacatcaccatggttaaatgggtgagcaacacgaggacagtggtcaggtggttgaataggcctcagaacatctccatcctcacactctgtgaatctaccaccggggcatgcagcaggaaatatgagatgacgtccgacacctggctctctaaacagaacgaggagccagtgttttccagagatggaagcaagttctycatgactgttcttgttaaacaaggtggaagaggagaattccaccacatagctatgttcctggtccagagtaaaagtgagcaaattacggtgcggcatctgacatcaggaaactgggaagtgataaggatcttggcctatgatgaaacaactcaaaaaatttactttctgagcacagaatcttctccccaagggaggcaactatacagtgcttctactgagggactattgaatcgtgattgcatctcatgcaactttatgaaagaagattgcacgtattttgatgccagctttagccccatgaatcagcatttcttgttattctgtgaaggtccaaaggtcccagtggtcagccttcacatcacagacaacccatcaaggtatttcctcttggaaaacaattctgtgatgaaagaaactattcagaagaagaagctcgcaaagagagagactagaatacttcacattgatgactatgaacttcctttacagttgtcctttcccaaagattttatggagaaaaaccagtatgctcttctattaataatggatgaagaaccaggaggccaaatggtgacagataagttccatgttgactgggattcagttcttattgacaccgataatgtcattgtagcaagatttgatggcagaggaagtggattccagggcctgaaagttttgcaggagattcacagaaggataggctcagtggaggcaaaggaccaagtagctgctgtaaaatatttactgaaacagccatatattgactccaaaagattaagcatttttggaaagggatatgggggctatatcgcatcaatgatcttaaaatcagatgagaagtttttcaaatgtggagccgtggttgcacccatctcagacatgaagttgtatgcctcagctttctctgaacggtaccttggcatgccatcaaaggaagaaagcacttaccaggcatccagtgtactgcataacattcatggtttaaaagaagaaaatttattaataattcacggaactgctgatacaaaagttcatttccagcattcagcagaattgatcaagcatctgataaaagctggggtgaattacactctgcaggtctatccagatgaaggatatcacatttcagacaagagcaagcatcatttttacagcacaattctcagattcttcagtgattgtctaaaggaagaggtatctgtgctgccacaggaaccagaagaagatgaataa

SEQ ID NO: 41 - protein, 796 aa, Mus musculus
  misc_feature (385)..(385): The 'Xaa' at location 385 stands for Ser, or Phe.
MNQTASVSHHIKCQPSKTIKELGSNSPPQRNWKGIAIALLVILVVCSLITMSVILLTPDELTNSSETRLSLEELLGKGFGLHNPEARRINDTVVVYKTNNGHVMKLNTESNASTLLLDNSTFVTFKASRHSLSPDLKYVLLAYDVKQIFHYSFTASYLIYNIHTGEVWELNPPEVEDSVLQYAAWGVQGQQLIYIFENNIYYQPDIKSSSLRLTSSGKEGIIFNGIADWLYEEELLHSHIAHWWSPDGERLAFLMINDSLVPNMIIPRFTGALYPKAKQYPYPKAGQANPSVKLYVVNLYGPTHTLELMPPDIFKSREYYITMVKWVSNTRTVVRWLNRPQNISILTLCESTTGACSRKYEMTSDTWLSKQNEEPVFSRDGSKFXMTVLVKQGGRGEFHHIAMFLVQSKSEQITVRHLTSGNWEVIRILAYDETTQKIYFLSTESSPQGRQLYSASTEGLLNRDCISCNFMKEDCTYFDASFSPMNQHFLLFCEGPKVPVVSLHITDNPSRYFLLENNSVMKETIQKKKLAKRETRILHIDDYELPLQLSFPKDFMEKNQYALLLIMDEEPGGQMVTDKFHVDWDSVLIDTDNVIVARFDGRGSGFQGLKVLQEIHRRIGSVEAKDQVAAVKYLLKQPYIDSKRLSIFGKGYGGYIASMILKSDEKFFKCGAVVAPISDMKLYASAFSERYLGMPSKEESTYQASSVLHNIHGLKEENLLIIHGTADTKVHFQHSAELIKHLIKAGVNYTLQVYPDEGYHISDKSKHHFYSTILRFFSDCLKEEVSVLPQEPEEDE

SEQ ID NO: 42 - DNA, 2391 bp, Mus musculus
ttattcatcttcttctggttcctgtggcagcacagatacctcttcctttagacaatcactgaagaatctgagaattgtgctgtaaaaatgatgcttgctcttgtctgaaatgtgatatccttcatctggatagacctgcagagtgtaattcaccccagcttttatcagatgcttgatcaattctgctgaatgctggaaatgaacttttgtatcagcagttccgtgaattattaataaattttcttcttttaaaccatgaatgttatgcagtacactggatgcctggtaagtgctttcttcctttgatggcatgccaaggtaccgttcagagaaagctgaggcatacaacttcatgtctgagatgggtgcaaccacggctccacatttgaaaaacttctcatctgattttaagatcattgatgcgatatagcccccatatccctttccaaaaatgcttaatcttttggagtcaatatatggctgtttcagtaaatattttacagcagctacttggtcctttgcctccactgagcctatccttctgtgaatctcctgcaaaactttcaggccctggaatccacttcctctgccatcaaatcttgctacaatgacattatcggtgtcaataagaactgaatcccagtcaacatggaacttatctgtcaccatttggcctcctggttcttcatccattattaatagaagagcatactggtttttctccataaaatctttgggaaaggacaactgtaaaggaagttcatagtcatcaatgtgaagtattctagtctctctctttgcgagcttcttcttctgaatagtttctttcatcacagaattgttttccaagaggaaataccttgatgggttgtctgtgatgtgaaggctgaccactgggacctttggaccttcacagaataacaagaaatgctgattcatggggctaaagctggcatcaaaatacgtgcaatcttctttcataaagttgcatgagatgcaatcacgattcaatagtccctcagtagaagcactgtatagttgcctcccttggggagaagattctgtgctcagaaagtaaattttttgagttgtttcatcataggccaagatccttatcacttcccagtttcctgatgtcagatgccgcaccgtaatttgctcacttttactctggaccaggaacatagctatgtggtggaattctcctcttccaccttgtttaacaagaacagtcatgragaacttgcttccatctctggaaaacactggctcctcgttctgtttagagagccaggtgtcggacgtcatctcatatttcctgctgcatgccccggtggtagattcacagagtgtgaggatggagatgttctgaggcctattcaaccacctgaccactgtcctcgtgttgctcacccatttaaccatggtgatgtaatattctcttgatttaaaaatgtcgggtggcatcagctccaaagtatgagttggtccatacaggtttacaacatataacttcactgatgggttcgcttgacctgccttggggtatgggtactgctttgctttggggtacagtgctccagtaaaccgaggtatgatcatgttaggcaccaacgagtcatttatcatcaggaaggcaagtctctctccatcgggggaccaccagtgggcgatatgagaatgcagaagttcttcttcatataaccagtcagcaatcccattaaaaataatgccttcctttcctgaagatgttagtcgtaaagaactgctcttgatatcaggttgatagtagatattgttttcaaaaatataaatcagctgctgtccttgcacaccccaggccgcatactgcaacactgagtcctcaacttctgggggattcaactcccacacttccccagtgtgtatgttgtaaatcaaatatgaagcggtaaatgagtaatgaaaaatctgcttgacgtcgtatgccaggagaacatactttaaatctggggaaagtgagtgtctggaggctttaaacgttacaaaagttgagttgtccaataacaatgtggaagcatttgattctgtattcagtttcatgacgtgtccattgttggttttatatacaacgactgtatcattgatcctccgagcttctggattatgaagtccaaatcctttccccaaaagctcctctagtgacagtcttgtttctgaagaatttgttagttcatctggtgttaacaggatgacagacattgtgatgagtgagcataccaccaagatcaccagcagggcaatggcgattcccttccagtttctttgtggagggctgttacttcctagttccttgatggtcttggagggctgacacttgatgtgatgggacacgctggctgtttggttcat

SEQ ID NO: 43 - DNA, 45 bp, Mus musculus
ccgctcccacgtttgcctctcttcatcttccctccgcccgactcc

SEQ ID NO: 44 - DNA, 68 bp, Mus musculus
caggctctcttgtctcatccatggacccagcaggaacttagagcagcctagtgcgctctggcgtcaga

SEQ ID NO: 45 - DNA, 39 bp, Mus musculus
atgctcaaggtggagagccgtggggaagcgggcagagag

SEQ ID NO: 46 - DNA, 72 bp, Mus musculus
atgacagccatgaagcaggagcagcaacccaccccaggggccagggcaacccagtcgcagccagccgaccag

SEQ ID NO: 47 - protein, 796 aa, Mus musculus; identical to SEQ ID NO: 41
  misc_feature (385)..(385): Xaa is any amino acid

SEQ ID NO: 48 - protein, 789 aa, Mus musculus
  misc_feature (378)..(378): Xaa is any amino acid
MLKVESRGEAGREELGSNSPPQRNWKGIAIALLVILVVCSLITMSVILLTPDELTNSSETRLSLEELLGKGFGLHNPEARRINDTVVVYKTNNGHVMKLNTESNASTLLLDNSTFVTFKASRHSLSPDLKYVLLAYDVKQIFHYSFTASYLIYNIHTGEVWELNPPEVEDSVLQYAAWGVQGQQLIYIFENNIYYQPDIKSSSLRLTSSGKEGIIFNGIADWLYEEELLHSHIAHWWSPDGERLAFLMINDSLVPNMIIPRFTGALYPKAKQYPYPKAGQANPSVKLYVVNLYGPTHTLELMPPDIFKSREYYITMVKWVSNTRTVVRWLNRPQNISILTLCESTTGACSRKYEMTSDTWLSKQNEEPVFSRDGSKFXMTVLVKQGGRGEFHHIAMFLVQSKSEQITVRHLTSGNWEVIRILAYDETTQKIYFLSTESSPQGRQLYSASTEGLLNRDCISCNFMKEDCTYFDASFSPMNQHFLLFCEGPKVPVVSLHITDNPSRYFLLENNSVMKETIQKKKLAKRETRILHIDDYELPLQLSFPKDFMEKNQYALLLIMDEEPGGQMVTDKFHVDWDSVLIDTDNVIVARFDGRGSGFQGLKVLQEIHRRIGSVEAKDQVAAVKYLLKQPYIDSKRLSIFGKGYGGYIASMILKSDEKFFKCGAVVAPISDMKLYASAFSERYLGMPSKEESTYQASSVLHNIHGLKEENLLIIHGTADTKVHFQHSAELIKHLIKAGVNYTLQVYPDEGYHISDKSKHHFYSTILRFFSDCLKEEVSVLPQEPEEDE

SEQ ID NO: 49 - protein, 800 aa, Mus musculus
  misc_feature (389)..(389): Xaa is any amino acid
MTAMKQEQQPTPGARATQSQPADQELGSNSPPQRNWKGIAIALLVILVVCSLITMSVILLTPDELTNSSETRLSLEELLGKGFGLHNPEARRINDTVVVYKTNNGHVMKLNTESNASTLLLDNSTFVTFKASRHSLSPDLKYVLLAYDVKQIFHYSFTASYLIYNIHTGEVWELNPPEVEDSVLQYAAWGVQGQQLIYIFENNIYYQPDIKSSSLRLTSSGKEGIIFNGIADWLYEEELLHSHIAHWWSPDGERLAFLMINDSLVPNMIIPRFTGALYPKAKQYPYPKAGQANPSVKLYVVNLYGPTHTLELMPPDIFKSREYYITMVKWVSNTRTVVRWLNRPQNISILTLCESTTGACSRKYEMTSDTWLSKQNEEPVFSRDGSKFXMTVLVKQGGRGEFHHIAMFLVQSKSEQITVRHLTSGNWEVIRILAYDETTQKIYFLSTESSPQGRQLYSASTEGLLNRDCISCNFMKEDCTYFDASFSPMNQHFLLFCEGPKVPVVSLHITDNPSRYFLLENNSVMKETIQKKKLAKRETRILHIDDYELPLQLSFPKDFMEKNQYALLLIMDEEPGGQMVTDKFHVDWDSVLIDTDNVIVARFDGRGSGFQGLKVLQEIHRRIGSVEAKDQVAAVKYLLKQPYIDSKRLSIFGKGYGGYIASMILKSDEKFFKCGAVVAPISDMKLYASAFSERYLGMPSKEESTYQASSVLHNIHGLKEENLLIIHGTADTKVHFQHSAELIKHLIKAGVNYTLQVYPDEGYHISDKSKHHFYSTILRFFSDCLKEEVSVLPQEPEEDE

SEQ ID NO: 50 - protein, 800 aa, Mus musculus
  misc_feature (389)..(389): Xaa is any amino acid
YTIGLERPPGQVRSHVCLSSSSLRPTPRLSCLIHGPSRNLEQPSALWRQNAQGGEPWGSGQRDELTNSSETRLSLEELLGKGFGLHNPEARRINDTVVVYKTNNGHVMKLNTESNASTLLLDNSTFVTFKASRHSLSPDLKYVLLAYDVKQIFHYSFTASYLIYNIHTGEVWELNPPEVEDSVLQYAAWGVQGQQLIYIFENNIYYQPDIKSSSLRLTSSGKEGIIFNGIADWLYEEELLHSHIAHWWSPDGERLAFLMINDSLVPNMIIPRFTGALYPKAKQYPYPKAGQANPSVKLYVVNLYGPTHTLELMPPDIFKSREYYITMVKWVSNTRTVVRWLNRPQNISILTLCESTTGACSRKYEMTSDTWLSKQNEEPVFSRDGSKFXMTVLVKQGGRGEFHHIAMFLVQSKSEQITVRHLTSGNWEVIRILAYDETTQKIYFLSTESSPQGRQLYSASTEGLLNRDCISCNFMKEDCTYFDASFSPMNQHFLLFCEGPKVPVVSLHITDNPSRYFLLENNSVMKETIQKKKLAKRETRILHIDDYELPLQLSFPKDFMEKNQYALLLIMDEEPGGQMVTDKFHVDWDSVLIDTDNVIVARFDGRGSGFQGLKVLQEIHRRIGSVEAKDQVAAVKYLLKQPYIDSKRLSIFGKGYGGYIASMILKSDEKFFKCGAVVAPISDMKLYASAFSERYLGMPSKEESTYQASSVLHNIHGLKEENLLIIHGTADTKVHFQHSAELIKHLIKAGVNYTLQVYPDEGYHISDKSKHHFYSTILRFFSDCLKEEVSVLPQEPEEDE

SEQ ID NO: 51 - DNA, 2909 bp, Mus musculus; identical to SEQ ID NO: 37

SEQ ID NO: 52 - DNA, 405 bp, Homo sapiens
agttaaacagcctggggctcagtgctgccatccgtaaattggaggattagagaaataatatacacaagtacctggtacataccaaatatgatagaagatatcttcaacctttagctataagaagaatggaaaatgaaaaagagacaggtggagagagggagggagatgagagctgcgtggagctggtatgctggttaggaggtaggaaataatgaggcctcgaccatctaagatacagaagtctccctgctgaatcgaaaggaagtgctacaatattctttcaaattcatcgcagttgagagaaaactggagcagagtgtgatatcaagaaagggcttcaccaggatgatcaatgcaaatggatatggagctttcttggaatgaaacattatcccgtaacaccag

SEQ ID NO: 53 - DNA, 32 bp, Homo sapiens
gtatacatacataaagagtggcttcaggactg

SEQ ID NO: 54 - DNA, 60 bp, Homo sapiens
ttgaagtacttctatgaacagaaatcttcccttatcagctacttggttgagatacaacag

SEQ ID NO: 55 - DNA, 70 bp, Homo sapiens
ttctgaaaactaactaagatgctggagaaattgggagaccatttgttgaagaaatacctactgaatcttg

SEQ ID NO: 56 - DNA, 94 bp, Homo sapiens
acggactctgcgggaagttagagcctctgcgtgcgctccggggcccggcgagaggatgcgcaaggtggagagccgcggggaagggggcagagag

SEQ ID NO: 57 - DNA, 206 bp, Homo sapiens
gttggttgacctttcttcccttgtacaaaggattctcaggtcaatagctagattttactaaactggccctgaaaattttataattttgattctcaatagcagttttctgtactctagtctgtgagttactggggaacatttgaaggcaagaagaatagcagttaatacggcgtgccaccttctcaccatgcacactggattcgcag

SEQ ID NO: 58 - DNA, 363 bp, Homo sapiens
tcaccatgcacactggattcgcaggaactgggaagtaacagccctccacagagaaactggaagggaattgctattgctctgctggtgattttagttgtatgctcactcatcactatgtcagtcatcctcttaaccccagatgaactcacaaattcgtcagaaaccagattgtctttggaagacctctttaggaaagactttgtgcttcacgatccagaggctcggtggatcaatggtaaccttcaaagcatcaagacattcagtttcaccagatttaaaatatgtccttctggcatatgatgtcaaacagatttttcattattcgtatactgcttcatatgtgatttacaacatacacactag

SEQ ID NO: 59 - DNA, 219 bp, Homo sapiens
tcaccatgcacactggattcgcagatgaactcacaaattcgtcagaaaccagattgtctttggaagacctctttaggaaagactttgtgcttcacgatccagaggctcggtggatcaatgatacagatgtggtgtataaaagcgagaatggacatgtcattaaactgaatatagaaacaaatgctaccacattattattggaaaacacaacttttgtaa

SEQ ID NO: 60 - DNA, 227 bp, Homo sapiens
tcaccatgcacactggattcgcaggtagctgtatgaactcacaaattcgtcagaaaccagattgtctttggaagacctctttaggaaagactttgtgcttcacgatccagaggctcggtggatcaatgatacagatgtggtgtataaaagcgagaatggacatgtcattaaactgaatatagaaacaaatgctaccacattattattggaaaacacaacttttgtaa

SEQ ID NO: 61 - DNA, 675 bp, Homo sapiens
ttaccactgggaagaaaagtaaaatgcatacagcctgccctactacctgcaaacggatataaggcagatcggatggctttttctttagaggggcatccttaagtggagttctcactctccctttaccacatgaaccatgtggtcttgcggaaggcaattaaccctgttaaggatttctcccccactaacagaagggcaataaacttaaattatctgcccaaacaaaaatgctatgtaagtgctttgtattatgatttgttctagtagcaatttttaaggatacgacattttcataaggagttgtatagtgagaatcaatttttatgacataaaagctgagaattttatttgcaattattattaactataatgatgataaaaattcattttgaagtcacccgggggatgaaaattatcttctaatattgtagtaacatctgcaagatttcatcatgaacctttaccatggaggtaggggaagaagattggattcaaatgtcattgaaagaactgattaattcagtaaaaaaaatgccagttagtcatcccagtgctgtgctaccaaaatggaaaatacctgggtagctgcattgatggtacatatggttgcattgaggaggaattgtatcatggaataaatataggcttcatatgaaaaaaaaaaaaaaaaaaaaa

SEQ ID NO: 62 - DNA, 293 bp, Homo sapiens
gagaacctgcccagaggagcctgctggaggatgaaggacacgtggagcacagccatgtagcccttgtcatctcagccgtggccatcctggaccaaatgctcacctgcaatgtgttcattatacttgttgtggcaatgcataaccaatatggttgctttgcctgtattttgtgacctctttgtgagtgagacatctatgtcttgattaagtctctttcccccattcctagaacagtagttggtctattacattttggttgaattaaaaaaaaaaaaaaaaaaaaaaaaaaaaaa

SEQ ID NO: 63 - DNA, 403 bp, Homo sapiens
gttttatggatcctgtgagtctgcttatcacagtcatttgaagagagaaacaacaactgccaatcatgaaacagaggatgtgtgagatatgggcttgctgtgaaccaagatgatccaaaggggatgctgaaagcttagcagaaccaaatactcaaatagaaaaaatgtggctgatttgcttcaacagctttccgagataatataccaaagtggaaactgatagcttctccagatcatacttgctcattctgtccccgattcttgggcagaactctggtctagagagaactttccttattccaagaagcaccgtgagcagaagacctaaaacaagacccatagagtaaagggacatgggaaacaaaatggcaaatctgacatcagaaaaaaaaaaaaaaaaaaa

SEQ ID NO: 64 - DNA, 426 bp, Homo sapiens
  misc_feature (420)..(420): n= a or g or t or c
gtactttgctgcctcctagtgttgtggtgaggctccaggctgagagaagtttcctctgagctccagctcagccagcacccttctgagtgatgaacactgttgcagaccatagacctgagacagctggctgcggtttgacacagtttagaagatgctactacatcagaggcctctcttgtccattgggtcccttgtagtggacccctttgctttactcctgaattgagtatcagtagggcatttgtgcagggcttttaaagacttctttcctctctcaaatacctcccttcttcccagtttctgacctggttactgtttggagtttttaattccctctgatcttaaggttatattgcagttcatgttaacattcaaatactattgagaaaaataaaacataaattttccagttaaaaaaanaaaaaa

SEQ ID NO: 65 - DNA, 426 bp, Homo sapiens; identical to SEQ ID NO: 64
  misc_feature (420)..(420): n= a or g or t or c

SEQ ID NO: 66 - DNA, 58 bp, Homo sapiens
gatccattgctgtttacatgggcccattaaatggagttatgactattttctagtttat

SEQ ID NO: 67 - DNA, 409 bp, Homo sapiens
gatccattgctgtttacatgggcccattaaatggagttatgactattttctagtttatgtaagttgaccttcacaagacgaacaattacctttaaatattgtttctgactaaagacaatactacgaatgcattagtaatagagaaaaaataggaagagctgacacttctacacttaagtggactcttatcagcccaagtaggaggtaaaattatggtaatctaatcagatataagaagcatttagataaccaaatttcaaattattagacagctaatatttgtattatgaatttatatccactgttgttagttgttaccatcactaaagtccatgatatgtatcgagacagtagttattaaaagtacatatttggggaatgtgaaaaaaaaaaaaaaaagaaaaaaaaa

SEQ ID NO: 68 - protein, 796 aa, Homo sapiens
MNQTASVSHHIKCQPSKTIKELGSNSPPQRNWKGIAIALLVILVVCSLITMSVILLTPDELTNSSETRLSLEDLFRKDFVLHDPEARWINDTDVVYKSENGHVIKLNIETNATTLLLENTTFVTFKASRHSVSPDLKYVLLAYDVKQIFHYSYTASYVIYNIHTREVWELNPPEVEDSVLQYAAWGVQGQQLIYIFENNIYYQPDIKSSSLRLTSSGKEEIIFNGIADWLYEEELLHSHIAHWWSPDGERLAFLMINDSLVPTMVIPRFTGALYPKGKQYPYPKAGQVNPTIKLYVVNLYGPTHTLELMPPDSFKSREYYITMVKWVSNTKTVVRWLNRPQNISILTVCETTTGACSKKYEMTSDTWLSQQNEEPVFSRDGSKFFMTVPVKQGGRGEFHHIAMFLIQSKSEQITVRHLTSGNWEVIKILAYDETTQKIYFLSTESSPRGRQLYSASTEGLLNRQCISCNFMKEQCTYFDASFSPMNQHFLLFCEGPRVPVVSLHSTDNPAKYFILESNSMLKEAILKKKIGKPEIKILHIDDYELPLQLSLPKDFMDRNQYALLLIMDEEPGGQLVTDKFHIDWDSVLIDMDNVIVARFDGRGSGFQGLKILQEIHRRLGSVEVKDQITAVKFLLKLPYIDSKRLSIFGKGYGGYIASMILKSDEKLFKCGSVVAPITDLKLYASAFSERYLGMPSKEESTYQAASVLHNVHGLKEENILIIHGTADTKVHFQHSAELIKHLIKAGVNYTMQVYPDEGHNVSEKSKYHLYSTILKFFSDCLKEEISVLPQEPEEDE

SEQ ID NO: 69 - protein, 746 aa, Homo sapiens
MSVILLTPDELTNSSETRLSLEDLFRKDFVLHDPEARWINDTDVVYKSENGHVIKLNIETNATTLLLENTTFVTFKASRHSVSPDLKYVLLAYDVKQIFHYSYTASYVIYNIHTREVWELNPPEVEDSVLQYAAWGVQGQQLIYIFENNIYYQPDIKSSSLRLTSSGKEEIIFNGIADWLYEEELLHSHIAHWWSPDGERLAFLMINDSLVPTMVIPRFTGALYPKGKQYPYPKAGQVNPTIKLYVVNLYGPTHTLELMPPDSFKSREYYITMVKWVSNTKTVVRWLNRPQNISILTVCETTTGACSKKYEMTSDTWLSQQNEEPVFSRDGSKFFMTVPVKQGGRGEFHHIAMFLIQSKSEQITVRHLTSGNWEVIKILAYDETTQKIYFLSTESSPRGRQLYSASTEGLLNRQCISCNFMKEQCTYFDASFSPMNQHFLLFCEGPRVPVVSLHSTDNPAKYFILESNSMLKEAILKKKIGKPEIKILHIDDYELPLQLSLPKDFMDRNQYALLLIMDEEPGGQLVTDKFHIDWDSVLIDMDNVIVARFDGRGSGFQGLKILQEIHRRLGSVEVKDQITAVKFLLKLPYIDSKRLSIFGKGYGGYIASMILKSDEKLFKCGSVVAPITDLKLYASAFSERYLGMPSKEESTYQAASVLHNVHGLKEENILIIHGTADTKVHFQHSAELIKHLIKAGVNYTMQVYPDEGHNVSEKSKYHLYSTILKFFSDCLKEEISVLPQEPEEDE

SEQ ID NO: 70 - protein, 746 aa, Homo sapiens
MSGILLTPDELTNSSETRLSLEDLFRKDFVLHDPEARWINDTDVVYKSENGHVIKLNIETNATTLLLENTTFVTFKASRHSVSPDLKYVLLAYDVKQIFHYSYTASYVIYNIHTREVWELNPPEVEDSVLQYAAWGVQGQQLIYIFENNIYYQPDIKSSSLRLTSSGKEEIIFNGIADWLYEEELLHSHIAHWWSPDGERLAFLMINDSLVPTMVIPRFTGALYPKGKQYPYPKAGQVNPTIKLYVVNLYGPTHTLELMPPDSFKSREYYITMVKWVSNTKTVVRWLNRPQNISILTVCETTTGACSKKYEMTSDTWLSQQNEEPVFSRDGSKFFMTVPVKQGGRGEFHHIAMFLIQSKSEQITVRHLTSGNWEVIKILAYDETTQKIYFLSTESSPRGRQLYSASTEGLLNRQCISCNFMKEQCTYFDASFSPMNQHFLLFCEGPRVPVVSLHSTDNPAKYFILESNSMLKEAILKKKIGKPEIKILHIDDYELPLQLSLPKDFMDRNQYALLLIMDEEPGGQLVTDKFHIDWDSVLIDMDNVIVARFDGRGSGFQGLKILQEIHRRLGSVEVKDQITAVKFLLKLPYIDSKRLSIFGKGYGGYIASMILKSDEKLFKCGSVVAPITDLKLYASAFSERYLGMPSKEESTYQAASVLHNVHGLKEENILIIHGTADTKVHFQHSAELIKHLIKAGVNYTMQVYPDEGHNVSEKSKYHLYSTILKFFSDCLKEEISVLPQEPEEDE

SEQ ID NO: 71 - protein, 789 aa, Homo sapiens [sequence omitted]

SEQ ID NO: 72 - protein, 746 aa, Homo sapiens; identical to SEQ ID NO: 69

SEQ ID NO: 73 - protein, 53 aa, Homo sapiens
MNQTASVSHHIKCQPSKTIKLPLGRKVKCIQPALLPANGYKADRMAFSLEGHP

SEQ ID NO: 74 - protein, 85 aa, Homo sapiens
MQMDMELSWNETLSRNTRYTYMKSGFRTGEPAQRSLLEDEGHVEHSHVALVISAVAILDQMLTCNVFIILVVAMHNQYGCFACIL

SEQ ID NO: 75 - protein, 41 aa, Homo sapiens
MQMDMELSWNETLSRNTRYTYMKSGFRTGFMDPVSLLITVI

SEQ ID NO: 76 - protein, 47 aa, Homo sapiens
MQMDMELSWNETLSRNTRYTYMKSGFRTGTLLPPSVVVRLQAERSFL

SEQ ID NO: 77 - protein, 45 aa, Homo sapiens
MQMDMELSWNETLSRNTRYTYMKSGFRTGSIAVYMGPLNGVMTIF

SEQ ID NO: 78 - protein, 45 aa, Homo sapiens; identical to SEQ ID NO: 77

SEQ ID NO: 79 - DNA, 715 bp, Homo sapiens
gtcccatcacatcaagtgtcaaccctcaaaaacaatcaagttaccactgggaagaaaagtaaaatgcatacagcctgccctactacctgcaaacggatataaggcagatcggatggctttttctttagaggggcatccttaagtggagttctcactctccctttaccacatgaaccatgtggtcttgcggaaggcaattaaccctgttaaggatttctcccccactaacagaagggcaataaacttaaattatctgcccaaacaaaaatgctatgtaagtgctttgtattatgatttgttctagtagcaatttttaaggatacgacattttcataaggagttgtatagtgagaatcaatttttatgacataaaagctgagaattttatttgcaattattattaactataatgatgataaaaattcattttgaagtcacccgggggatgaaaattatcttctaatattgtagtaacatctgcaagatttcatcatgaacctttaccatggaggtaggggaagaagattggattcaaatgtcattgaaagaactgattaattcagtaaaaaaaatgccagttagtcatcccagtgctgtgctaccaaaatggaaaatacctgggtagctgcattgatggtacatatggttgcattgaggaggaattgtatcatggaataaatataggcttcatatgaaaaaaaaaaaaaaaaaaaaa

SEQ ID NO: 80 - DNA, 2298 bp, Homo sapiens
tgagatgacatcagatacgtggctctctcagcagaatgaggagcccgtgttttctagagacggcagcaaattctttatgacagtgcctgttaagcaagggggacgtggagaatttcaccacatagctatgttcctcatccagagtaaaagtgagcaaattaccgtgcggcatctgacatcaggaaactgggaagtgataaagatcttggcatacgatgaaactactcaaaaaatttactttctgagcactgaatcttctcccagaggaaggcagctgtacagtgcttctactgaaggattattgaatcgccaatgcatttcatgtaatttcatgaaagaacaatgtacatattttgatgccagttttagtcccatgaatcaacatttcttattattctgtgaaggtccaagggtcccagtggtcagcctacatagtacggacaacccagcaaaatattttatattggaaagcaattctatgctgaaggaagctatcctgaagaagaagataggaaagccagaaattaaaatccttcatattgacgactatgaacttcctttacagttgtcccttcccaaagattttatggaccgaaaccagtatgctcttctgttaataatggatgaagaaccaggaggccagctggttacagataagttccatattgactgggattccgtactcattgacatggataatgtcattgtagcaagatttgatggcagaggaagtggattccagggtctgaaaattttgcaggagattcatcgaagattaggttcagtagaagtaaaggaccaaataacagctgtgaaatttttgctgaaactgccttacattgactccaaaagattaagcatttttggaaagggttatggtggctatattgcatcaatgatcttaaaatcagatgaaaagctttttaaatgtggatccgtggttgcacctatcacagacttgaaattgtatgcctcagctttctctgaaagataccttgggatgccatctaaggaagaaagcacttaccaggcagccagtgtgctacataatgttcatggcttgaaagaagaaaatatattaataattcatggaactgctgacacaaaagttcatttccaacactcagcagaattaatcaagcacctaataaaagctggagtgaattatactatgcaggtctacccagatgaaggtcataacgtatctgagaagagcaagtatcatctctacagcacaatcctcaaattcttcagtgattgtttgaaggaagaaatatctgtgctaccacaggaaccagaagaagatgaataatggaccgtatttatacagaactgaagggaatattgaggctcaatgaaacctgacaaagagactgtaatattgtagttgctccagaatgtcaagggcagcttacggagatgtcactggagcagcacgctcagagacagtgaactagcatttgaatacacaagtccaagtctactgtgttgctaggggtgcagaacccgtttctttgtatgagagaggtcaaagggttggtttcctgggagaaattagttttgcattaaagtaggagtagtgcatgttttcttctgttatccccctgtttgttctgtaactagttgctctcattttaatttcactggccaccatcatctttgcatataatgcacaatctatcatctgtcctacagtccctgatctttcatggctgagctgcaatctaacactttactgtacctttataataagtgcaattctttcattgtctattattatgcttaagaaaatattcagttaataaaaaacagagtattttatgtaatttctgtttttaaaaagacattattaaatgggtcaaaggacatatagaaatgtggatttcagcaccttccaaagttcagccagttatcagtagatacaatatctttaaatgaacacacgagtgtatgtctcacaatatatatacacaagtgtgcatatacagttaatgaaactatctttaaatgttattcatgctataaagagtaaacgtttgatgaattagaagagatgctcttttccaagctataatggatgctttgtttaatgagccaaatatgatgaaacattttttccaattcaaattctagctattgctttcctataaatgtttgggttgtgtttggtattgtttttagtggttaatagttttccagttgcatttaattttttgaatatgataccttgtcacatgtaaattagatacttaaatattaaattatagtttctgataaaaaaaaaaaaaaaaaaaaaaa

SEQ ID NO: 81 - DNA, 224 bp, Homo sapiens
ctccggagtgaggaagcagcagaaacagaagcagcagaagcaacagcagtagcagcggcagcagcaacagcagcagcccctactgaagtccaatagaggagacttgatctctagttcattctggaactccgcctgggattgtgcactgtccagggtcctgaaacatgaaccaaactgccagcgtgtcccatcacatcaagtgtcaaccctcaaaaacaatcaag

SEQ ID NO: 82 - DNA, 115 bp, Homo sapiens
gaactgggaagtaacagccctccacagagaaactggaagggaattgctattgctctgctggtgattttagttgtatgctcactcatcactatgtcagtcatcctcttaaccccag

SEQ ID NO: 83 - DNA, 96 bp, Homo sapiens
atgaactcacaaattcgtcagaaaccagattgtctttggaagacctctttaggaaagactttgtgcttcacgatccagaggctcggtggatcaatg

SEQ ID NO: 84 - DNA, 99 bp, Homo sapiens
atacagatgtggtgtataaaagcgagaatggacatgtcattaaactgaatatagaaacaaatgctaccacattattattggaaaacacaacttttgtaa

SEQ ID NO: 85 - DNA, 124 bp, Homo sapiens
ccttcaaagcatcaagacattcagtttcaccagatttaaaatatgtccttctggcatatgatgtcaaacagatttttcattattcgtatactgcttcatatgtgatttacaacatacacactag

SEQ ID NO: 86 - DNA, 82 bp, Homo sapiens
ggaagtttgggagttaaatcctccagaagtagaggactccgtcttgcagtacgcggcctggggtgtccaagggcagcagctg

SEQ ID NO: 87 - DNA, 121 bp, Homo sapiens
atttatatttttgaaaataatatctactatcaacctgatataaagagcagttcattgcgactgacatcttctggaaaagaagaaataatttttaatgggattgctgactggttatatgaag

SEQ ID NO: 88 - DNA, 155 bp, Homo sapiens
aggaactcctgcattctcacatcgcccactggtggtcaccagatggagaaagacttgccttcctgatgataaatgactctttggtacccaccatggttatccctcggtttactggagcgttgtatcccaaaggaaagcagtatccgtatcctaag

SEQ ID NO: 89 - DNA, 98 bp, Homo sapiens
gcaggtcaagtgaacccaacaataaaattatatgttgtaaacctgtatggaccaactcacactttggagctcatgccacctgacagctttaaatcaag

SEQ ID NO: 90 - DNA, 124 bp, Homo sapiens
agaatactatatcactatggttaaatgggtaagcaataccaagactgtggtaagatggttaaaccgagctcagaacatctccatcctcacagtctgtgagaccactacaggtgcttgtagtaaa

SEQ ID NO: 91 - DNA, 39 bp, Homo sapiens
aaatatgagatgacatcagatacgtggctctctcagcag

SEQ ID NO: 92 - DNA, 108 bp, Homo sapiens
aatgaggagcccgtgttttctagagacggcagcaaattctttatgacagtgcctgttaagcaagggggacgtggagaatttcaccacgtagctatgttcctcatccag

SEQ ID NO: 93 - DNA, 92 bp, Homo sapiens
agtaaaagtgagcaaattaccgtgcggcatctgacatcaggaaactgggaagtgataaagatcttggcatacgatgaaactactcaaaaaat

SEQ ID NO: 94 - DNA, 48 bp, Homo sapiens
ttactttctgagcactgaatcttctcccagaggaaggcagctgtacag

SEQ ID NO: 95 - DNA, 122 bp, Homo sapiens
tgcttctactgaaggattattgaatcgccaatgcatttcatgtaatttcatgaaagaacaatgtacatattttgatgccagttttagtcccatgaatcaacatttcttattattctgtgaag

SEQ ID NO: 96 - DNA, 48 bp, Homo sapiens
gtccaagggtcccagtggtcagcctacatagtacggacaacccagcaa

SEQ ID NO: 97 - DNA, 99 bp, Homo sapiens
aatattttatattggaaagcaattctatgctgaaggaagctatcctgaagaagaagataggaaagccagaaattaaaatccttcatattgacgactatg

SEQ ID NO: 98 - DNA, 70 bp, Homo sapiens
aacttcctttacagttgtcccttcccaaagattttatggaccgaaaccagtatgctcttctgttaataat

SEQ ID NO: 99 - DNA, 195 bp, Homo sapiens
ggatgaagaaccaggaggccagctggttacagataagttccatattgactgggattccgtactcattgacatggataatgtcattgtagcaagatttgatggcagaggaagtggattccagggtctgaaaattttgcaggagattcatcgaagattaggttcagtagaagtaaaggaccaaataacagctgtgaa

SEQ ID NO: 100 - DNA, 55 bp, Homo sapiens
atttttgctgaaactgccttacattgactccaaaagattaagcatttttggaaag

SEQ ID NO: 101 - DNA, 100 bp, Homo sapiens
ggttatggtggctatattgcatcaatgatcttaaaatcagatgaaaagctttttaaatgtggatccgtggttgcacctatcacagacttgaaattgtatg

SEQ ID NO: 102 - DNA, 59 bp, Homo sapiens
cctcagctttctctgaaagataccttgggatgccatctaaggaagaaagcacttaccag

SEQ ID NO: 103 - DNA, 73 bp, Homo sapiens
gcagccagtgtgctacataatgttcatggcttgaaagaagaaaatatattaataattcatggaactgctgaca

SEQ ID NO: 104 - DNA, 74 bp, Homo sapiens
caaaagttcatttccaacactcagcagaattaatcaagcacctaataaaagctggagtgaattatactatgcag

SEQ ID NO: 105 - DNA, 1122 bp, Homo sapiens
gtctacccagatgaaggtcataacgtatctgagaagagcaagtatcatctctacagcacaatcctcaaattcttcagtgattgtttgaaggaagaaatatctgtgctaccacaggaaccagaagaagatgaataatggaccgtatttatacagaactgaagggaatattgaggctcaatgaaacctgacaaagagactgtaatattgtagttgctccagaatgtcaagggcagcttacggagatgtcactggagcagcacgctcagagacagtgaactagcatttgaatacacaagtccaagtctactgtgttgctaggggtgcagaacccgtttctttgtatgagagaggtcaaagggttggtttcctgggagaaattagttttgcattaaagtaggagtagtgcatgttttcttctgttatccccctgtttgttctgtaactagttgctctcattttaatttcactggccaccatcatctttgcatataatgcacaatctatcatctgtcctacagtccctgatctttcatggctgagctgcaatctaacactttactgtacctttataataagtgcaattctttcattgtctattattgtgcttaagaaaatattcagttaataaaaaacagagtattttatgtaatttctgtttttaaaaagacattattaaatgggtcaaaggacatatagaaatgtggatttcagcaccttccaaagttcagccagttatcagtagatacaatatctttaaatgaacacacgagtgtatgtctcacaatatatatacacaagtgtgcatatacagttaatgaaactatctttaaatgttattcatgctataaagagtaaacgtttgatgaattagaagagatgctcttttccaagctataatggatgctttgtttaatgagccaaatatgatgaaacattttttccaattcaaattctagctattgctttcctataaatgtttgggttgtgtttggtattgtttttagtggttaatagttttccagttgcatttaattttttgaatatgataccttgtcacatgtaaattagatacttaaatattaaattatagtytctgataaagaaattttgttaacaatgcaa

SEQ ID NO: 106 - protein, 796 aa, Homo sapiens; identical to SEQ ID NO: 68
  DOMAIN (1)..(34): Cytoplasmic domian
  CARBOHYD (111)..(111): N-linked
  CARBOHYD (257)..(257): N-linked
  CARBOHYD (342)..(342): N-linked
  CARBOHYD (748)..(748): N-linked
  CARBOHYD (760)..(760): N-linked
  domain (228)..(234): B-propeller
  TRANSMEM (35)..(56)

SEQ ID NO: 107 - protein, 34 aa, Homo sapiens
  Domain (1)..(34): Cytoplasmic domain
MNQTASVSHHIKCQPSKTIKELGSNSPPQRNWKG

SEQ ID NO: 108 - protein, 22 aa, Homo sapiens
  TRANSMEM (1)..(22)
IAIALLVILVVCSLITMSVILL

SEQ ID NO: 109 - protein, 7 aa, Homo sapiens
  DOMAIN (1)..(7): B-propeller
DWLYEEE

SEQ ID NO: 110 - protein, 796 aa, Homo sapiens; identical to SEQ ID NO: 68
  TRANSMEM (34)..(54)

SEQ ID NO: 111 - protein, 237 aa, Homo sapiens
QYALLLIMDEEPGGQLVTDKFHIDWDSVLIDMDNVIVARFDGRGSGFQGLKILQEIHRRLGSVEVKDQITAVKFLLKLPYIDSKRLSIFGKGYGGYIASMILKSDEKLFKCGSVVAPITDLKLYASAFSERYLGMPSKEESTYQAASVLHNVHGLKEENILIIHGTADTKVHFQHSAELIKHLIKAGVNYTMQVYPDEGHNVSEKSKYHLYSTILKFFSDCLKEEISVLPQEPEEDE

SEQ ID NO: 112 - protein, 238 aa, Homo sapiens
AFPLVLHVDASPGSQLVTERFHVDWNWYLASQRSFIVAQIDGRGSGFQGELLRTQVHGKLGTVEVEDQLGVLTYLRDNLKFIDPLRICAFGWGYGGYASSMMLIDDSQQVLQCAVAINPIVNFGFHYSFFTERYIPLKGDYLRALQEADLTMKAGNIKGRNLMLMHGTADTLVHQEHTLMLVRALVEQQVKFRHQVYPDEDHAIARSLSHVYKTMEWYFDECFGPVDDNEWDPTGLFL

SEQ ID NO: 113 - protein, 241 aa, Homo sapiens
HYPLLLVVDGTPGSQSVAEKFEVSWETVMVSSHGAVVVKCDGRGSGFQGTKLLHEVRRRLGLLEEKDQMEAVRTMLKEQYIDRTRVAVFGKDYGGYLSTYILPAKGQTFTCGSALSPITDFKLYASAFSERYLGLHGLDNRAYEMTKVAHRVSALEEQQFLIIHPTADEKIHFQHTAELITQLIRGKANYSLQIYPDESHYFTSSSLKQHLYRSIINFFVECFRIQDKLPTVTAKEDEEED

SEQ ID NO: 114 - protein, 228 aa, Homo sapiens
KYPLLLDVYAGPCSQKADTVFRLNWATYLASTENIIVASFDGRGSGYQGDKIMHAINRRLGTFEVEDQIEAARQFSKMGFVDNKRIAIWGWSYGGYVTSMVLGSGSGVFKCGIAVAPVSRWEYYDSVYTERYMGLPTPEDNLDHYRNSTVMSRAENFKQVEYLLIHGTADDNVHFQQSAQISKALVDVGVDFQAMWYTDEDHGIASSTAHQHIYTHMSHFIKQCFSLP

SEQ ID NO: 115 - protein, 228 aa, Homo sapiens
KYPLLIQVYGGPCSQSVRSVFAVNWISYLASKEGMVIALVDGRGTAFQGDKLLYAVYRKLGVYEVEDQITAVRKFIEMGFIDEKRIAIWGWSYGGYVSSLALASGTGLFKCGIAVAPVSSWEYYASVYTERFMGLPTKDDNLEHYKNSTVMARAEYFRNVDYLLIHGTADDNVHFQNSAQIAKALVNAQVDFQAMWYSDQNHGLSGLSTNHLYTHMTHFLKQCFSLSD

SEQ ID NO: 116 - protein, 57 aa, Homo sapiens
ELGSNSPPQRNWKGIAIALLVILVVCSLITMSVILLTPDELTNSSETRLSLEDLGDH

SEQ ID NO: 117 - protein, 58 aa, Homo sapiens
ELVGSNPPQRNWKGIAIALLVILVICSLIVTSVILLTPAEDNSLSQKKKVTVEDLDDH

SEQ ID NO: 118 - protein, 58 aa, Homo sapiens
HLVSSNPNQRNWRGILIALLVIIIVLALIVTSVVLLTPPDEGPRVKGQRIKLQDISDH

SEQ ID NO: 119 - protein, 58 aa, Homo sapiens
ELVAISPERRNWRGIFIALLVIAAVFSLIIFSIFLLSPEDEGLRIRGRRMLPSDIGDH

SEQ ID NO: 120 - protein, 58 aa, Homo sapiens
ELGGNESQKRDCKGITTAIVVVLLILVMIFAALVFFTPLFAAKSFGSWRLNVSDLSDH

SEQ ID NO: 121 - protein, 51 aa, Homo sapiens
MKTPWKVLLGLLGAAALVTIITVPVVLLNKGTDDATADSRKTYTLTDYSDH

SEQ ID NO: 122 - protein, 50 aa, Homo sapiens
TTLLLENTTFVTFKASRHSVSPDLKYVLLAYDVKQIFHYSYTASYVIYNI

SEQ ID NO: 123 - protein, 52 aa, Homo sapiens
SSVFLENSTFDEFGHSINDYSISPDGQFILLEYNYVKQWRHSYTASYDIYDL

SEQ ID NO: 124 - protein, 50 aa, Homo sapiens
VWELNPPEVEDSVLQYAAWGVQGQQLIYIFENNIYYQPDIKSSSLRLTSS

SEQ ID NO: 125 - protein, 48 aa, Homo sapiens
QLITEERIPNNTQWVTWSPVGHKLAYVWNNDIYVKIEPNLPSYRITWT

SEQ ID NO: 126 - protein, 48 aa, Homo sapiens
ADWLYEEELLHSHIAHWWSPDGERLAFLMINDSLVPTMVIPRFTGALY

SEQ ID NO: 127 - protein, 48 aa, Homo sapiens
TDWVYEEEVFSAYSALWWSPNGTFLAYAQFNDTEVPLIEYSFYSDESL

SEQ ID NO: 128 - protein, 54 aa, Sus scrofa
ARVFLDPNILSDDGTVALRGYAFSEDGEYFAYGLSASGSDWVTIKFMKVDGAKE

SEQ ID NO: 129 - protein, 50 aa, Sus scrofa
SEDILCAEFPDEPKWMGGAELSDDGRYVLLSIREGCDPVNRLWYCDLQQE

SEQ ID NO: 130 - protein, 16 aa, Homo sapiens
CAPASASPYSSDTTPC

SEQ ID NO: 131 - protein, 16 aa, Homo sapiens
LCLSDGKPVSLSYRCP

SEQ ID NO: 132 - protein, 16 aa, Homo sapiens
SPGGLAGPASVPTTCC

SEQ ID NO: 133 - protein, 16 aa, Homo sapiens
LSGIGGVPLSRTVRCT

SEQ ID NO: 134 - protein, 16 aa, Homo sapiens
SPQGLAQPDSVSIPIT

SEQ ID NO: 135 - protein, 16 aa, Homo sapiens
IFLGLGQPRSPKSKRK

SEQ ID NO: 136 - protein, 16 aa, Homo sapiens
ALVTNSAPTSSSTKKT

SEQ ID NO: 137 - protein, 16 aa, Homo sapiens
GPLASAGPVSAVLTEL

SEQ ID NO: 138 - protein, 16 aa, Homo sapiens
TLLVRATPVSQTTTAA

SEQ ID NO: 139 - protein, 16 aa, Homo sapiens
PEDVDSKSMQVPFSRC

SEQ ID NO: 140 - protein, 16 aa, Homo sapiens
ISAALCEGAVLPRSAK

SEQ ID NO: 141 - protein, 16 aa, Homo sapiens
PDPTAAFLLPPSTACC

SEQ ID NO: 142 - protein, 796 aa, Homo sapiens; identical to SEQ ID NO: 68

SEQ ID NO: 143 - protein, 796 aa, Mus musculus; identical to SEQ ID NO: 41
  misc_feature (385)..(385): Xaa is any amino acid

SEQ ID NO: 144 - protein, 865 aa, Homo sapiens
MASLYQRFTGKINTSRSFPAPPEASHLLGGQGPEEDGGAGAKPLGPRAQAAAPRERGGGGGGAGGRPRFQYQGRSDGDEEDELVGSNPPQRNWKGIAIALLVILVICSLIVTSVILLTPAEDNSLSQKKKVTVEDLFSEDFKIHDPEAKWISDTEFIYREQKGTVRLWNVETNTSTVLIEGKKIESLRAIRYEISPDREYALFSYNVEPIYQHSYTGYYVLSKIPHGDPQSLDPPEVSNAKLQYAGWGPKGQQLIFIFENNIYYCAHVGKQAIRVVSTGKEGVIYNGLSDWLYEEEILKTHIAHWWSPDGTRLAYAAINDSRVPIMELPTYTGSIYPTVKPYHYPKAGSENPSISLHVIGLNGPTHDLEMMPPDDPRMREYYITMVKWATSTKVAVTWLNRAQNVSILTLCDATTGVCTKKHEDESEAWLHRQNEEPVFSKDGRKFFFIRAIPQGGRGKFYHITVSSSQPNSSNDNIQSITSGDWDVTKILAYDEKGNKIYFLSTEDLPRRRQLYSANTEGNFNRQCLSCDLVENCTYFSASFSHSMDFFLLKCEGPGVPMVTVHNTTDKKKMFDLETNEHVKKAINDRQMPKVEYRDIEIDDYNLPMQILKPATFTDTTHYPLLLVVDGTPGSQSVAEKFEVSWETVMVSSHGAVVVKCDGRGSGFQGTKLLHEVRRRLGLLEEKDQMEAVRTMLKEQYIDRTRVAVFLKDYGGYLSTYILPAKGENQGQTFTCGSALSPITDFKLYASAFSERYLGLHGLDNRAYEMTKVAHRVSALEEQQFLIIHPTADEKIHFQHTAELITQLIRGKANYSLQIYPDESHYFTSSSLKQHLYRSIINFFVECFRIQDKLPTVTAKEDEEED

SEQ ID NO: 145 - protein, 805 aa, Homo sapiens
MTTAKEPSASGKSVQQQEQEELVGSNPPQRNWKGIAIALLVILVICSLIVTSVILLTPAEDNSLSQKKKVTVEDLFSEDFKIHDPEAKWISDTEFIYREQKGTVRLWNVETNTSTVLIEGKKIESLRAIRYEISPDREYALFSYNVEPIYQHSYTGYYVLSKIPHGDPQSLDPPEVSNAKLQYAGWGPKGQQLIFIFENNIYYCAHVGKQAIRVVSTGKEGVIYNGLSDWLYEEEISLKTHIAHWWSPDGTRLAYAAINDSRVPIMELPTYTGSIYPTVKPYHYPKAGSENPSISLHVIGLNGPTHDLEMMPPDDPRMREYYITMVKWATSTKVAVTWLNRAQNVSILTLCDATTGVCTKKHEDESEAWLHRQNEEPVFSKDGRKFFFIRAIPQGGRGKFYHITVSSSQPNSSNDNIQSITSGDWDVTKILAYDEKGNKIYFLSTEDLPRRRQLYSANTEGNFNRQCLSCDLVENCTYFSASFSHSMDFFLLKCEGPGVPMVTVHNTTDKKKMFDLETNEHVKKAINDRQMPKVEYRDIEIDDYNLPMQILKPATFTDTTHYPLLLVVDGTPGSQSVAEKFEVSWETVMVSSHGAVVVKCDGRGSGFQGTKLLHEVRRRLGLLEEKDQMEAVRTMLKEQYIDRTRVAVFLKDYGGYLSTYILPAKGENQGQTFTCGSALSPITDFKLYASAFSERYLGLHGLDNRAYEMTKVAHRVSALEEQQFLIIHPTADEKIHFQHTAELITQLIRGKANYSLQIYPDESHYFTSSSLKQHLYRSIINFFVECFRIQDKLPTVTAKEDEEED

SEQ ID NO: 146 - protein, 796 aa, Homo sapiens; identical to SEQ ID NO: 68

SEQ ID NO: 147 - protein, 766 aa, Homo sapiens [sequence omitted]

SEQ ID NO: 148 - DNA, 19 bp, Artificial Sequence
  Primer
aattctcgttaaaatatgt

SEQ ID NO: 149 - DNA, 73 bp, Homo sapiens
ccaagctggaagtttctatagttttctattcaaaggactracatattttaacgagaattagttatcctggagg

SEQ ID NO: 150 - DNA, 100 bp, Homo sapiens
tggggaacatttgaaggcaagaagaatagcagttaatacggcgtgccaccttctcaccatgcacactggattcgcaggtagctgtgtatgcatgcactta

SEQ ID NO: 151 - DNA, 100 bp, Homo sapiens
gttaatacggcgtgccaccttctcaccatgcacactggattcgcaggtagctgtgtatgcatgcacttacatttcctaaaccagttttattgtttttcct

SEQ ID NO: 152 - DNA, 100 bp, Homo sapiens
ctatttcaataattattttgcagagtattttggctatcatcctggtgtttatagtcaatgcatttttacaccatctacattttggacagcaagcataaaa

SEQ ID NO: 153 - DNA, 100 bp, Homo sapiens
attacctggatgttactaagaatatatatacatatattcacattaagataaagctatgatcaataatgtttcttttttaatttcagatttttcattattc

SEQ ID NO: 154 - DNA, 100 bp, Homo sapiens
aggcattggtatgcactgaacactgccaatcatggttttatggaagatgttaactgaaactttggaaaaaccataggaaaacttgtcctacaaaacttta

SEQ ID NO: 155 - DNA, 100 bp, Homo sapiens
aaaaccataggaaaacttgtcctacaaaactttatgtttccctaagtcctttatatcttttatctaatagtccaacttaagaatacattaaatgatacta

SEQ ID NO: 156 - DNA, 100 bp, Homo sapiens
taaacatacattttaattttgtttccaaactagagaatactatatcactatggttaaatgggtaagcaataccaagactgtggtaagatggttaaaccga

SEQ ID NO: 157 - DNA, 100 bp, Homo sapiens
aggaaactgggaagtgataaagatcttggcatacgatgaaactactcaaaaaatgtgagtgttttcagttctctagtcaggctgcaagttagcgttgtca

SEQ ID NO: 158 - DNA, 100 bp, Homo sapiens
gtcaaaacaagccagccatggaaagaataacctttctttaaagacctcttccacacttcacacagagacatcttacacagagggatgtgtgtgtgcacac

SEQ ID NO: 159 - DNA, 100 bp, Homo sapiens
atcagctttgtgaacatcagtggctagtctataaaagactagagataaagagaaagcatgtagaattggctaaaaacatagaaatatagaacatttgggg

SEQ ID NO: 160 - DNA, 100 bp, Homo sapiens
cttacccttctgaataaaacgcttataaataggaatgaaagctagttatctggtttctgttttgttatgttttaaccacgaagtgcttccatttgggggg

SEQ ID NO: 161 - DNA, 100 bp, Homo sapiens
ttatgttttaaccacgaagtgcttccatttggggggaaaaaactattatgtaaactttctaatgattattacttagacatctttaaaaatatttatacac

SEQ ID NO: 162 - DNA, 100 bp, Homo sapiens
ttacttagacatctttaaaaatatttatacacatatttttaaattccaggtccaagggtcccagtggtcagcctacatagtacggacaacccagcaagtg

SEQ ID NO: 163 - DNA, 100 bp, Homo sapiens
agccagaaattaaaatccttcatattgacgactatggtaaaattttgtgcatgctatgttattcaagaacaactttctctgcgtcttatagttttacctg

SEQ ID NO: 164 - DNA, 100 bp, Homo sapiens
aaggaagaaagcacttaccaggtaactaatttgaaaataacaaagaaagaggagtatttttgttctaaaaaattagttaaatggcttatttagatctata

SEQ ID NO: 165 - DNA, 100 bp, Homo sapiens
gttcatttccaacactcagcagaattaatcaagcacctaataaaagctggagtgaattatactatgcaggtaagctactttcttagaagaacgtgttttc

SEQ ID NO: 166 - DNA, 100 bp, Homo sapiens
agcttacggagatgtcactggagcagcacgctcagagacagtgaactagcatttgaatacacaagtccaagtctactgtgttgctaggggtgcagaaccc

SEQ ID NO: 167 - DNA, 100 bp, Homo sapiens
atttcctaaaccagttttattgtttttcctgaacatacatgcttgttgtttaaaaaaaactgttctgaaatatataattctttctcattcctgcagagta

SEQ ID NO: 168 - DNA, 100 bp, Homo sapiens
aacatacatgcttgttgtttaaaaaaaactgttctgaaatatataattctttctcattcctgcagagtaatcactaattcaggtcttttttaagtcctac

SEQ ID NO: 169 - DNA, 100 bp, Homo sapiens
gctgctggtttatctcacagagagagcagattgtcccccaaaagatagccatttataatatgtgcacttttgaataattaaatgaactactgaagaggaa

SEQ ID NO: 170 - DNA, 100 bp, Homo sapiens
tatactgcttcatatgtgatttacaacatacacactaggtaagttctttgattttctagttttcatgagcaattgtgttactaaattgttggtgtagata

SEQ ID NO: 171 - DNA, 100 bp, Homo sapiens
gtttccctaagtcctttatatcttttatctaatagtccaacttaagaatacattaaatgatactagtattattttatcagttaataaagacaaaagttta

SEQ ID NO: 172 - DNA, 100 bp, Homo sapiens
tattattttatcagttaataaagacaaaagtttattaagtaatatatgattaaactgctggtttataatgaaacctagaagagattcaaggttactagga

SEQ ID NO: 173 - DNA, 100 bp, Homo sapiens
ctcagaacatctccatcctcacagtctgtgagaccactacaggtgcttgtagtaaagtgagtataatttatttttcttttatgcctaaaatgaagtagct

SEQ ID NO: 174 - DNA, 100 bp, Homo sapiens
atgccatcttttctaatagaattatgttttgcttaccatagtcctagtcaaaacaagccagccatggaaagaataacctttctttaaagacctcttccac

SEQ ID NO: 175 - DNA, 100 bp, Homo sapiens
cacacacacacacatatactcacacacagtgattgagagaggttatgaaaaaggatgattttatcaggggaaaaaaatatgtttcctagtttgatcatag

SEQ ID NO: 176 - DNA, 100 bp, Homo sapiens
aagagagaatcttaacaataatctctgcaaatagtttccttctcatatattcttacccttctgaataaaacgcttataaataggaatgaaagctagttat

SEQ ID NO: 177 - DNA, 100 bp, Homo sapiens
aaaaactattatgtaaactttctaatgattattacttagacatctttaaaaatatttatacacatatttttaaattccaggtccaagggtcccagtggtc

SEQ ID NO: 178 - DNA, 100 bp, Homo sapiens
tatttttaaattccaggtccaagggtcccagtggtcagcctacatagtacggacaacccagcaagtgagtacacaagaagacaattaagaatagttatgg

SEQ ID NO: 179 - DNA, 100 bp, Homo sapiens
gtacacaagaagacaattaagaatagttatggttggcattagtcttagacatcgtgttatctattctgagtcatatcctctataaattcttcttcaaaaa

SEQ ID NO: 180 - DNA, 100 bp, Homo sapiens
aaatgactctccatctttaatattttgctctttctttaaaagaacttcctttacagttgtcccttcccaaagattttatggaccgaaaccagtatgctct

SEQ ID NO: 181 - DNA, 100 bp, Homo sapiens
atacagatatttgtattttcctttataggcagccagtgtgctacataatgttcatggcttgaaagaagaaaatatattaataattcatggaactgctgac

SEQ ID NO: 182 - DNA, 100 bp, Homo sapiens
tgctgtgttttttcacttgtgagatacgcaacacagcttctctattattccattctccctactattattttttaatatgttttttagttaccaaagattg

SEQ ID NO: 183 - DNA, 100 bp, Homo sapiens
tttctttgtatgagagaggtcaaagggttggtttcctgggagaaattagttttgcattaaagtaggagtagtgcatgttttcttctgttatccccctgtt

SEQ ID NO: 184 - DNA, 20 bp, Artificial Sequence
  Primer
gcaccagcctaatacataga

SEQ ID NO: 185 - DNA, 20 bp, Artificial Sequence
  Primer
caggctcaagttatgatgat

SEQ ID NO: 186 - DNA, 20 bp, Artificial Sequence
  Primer
actttttaatcaggtgcatg

SEQ ID NO: 187 - DNA, 21 bp, Artificial Sequence
  Primer
ctgtcagttgtttcattattg

SEQ ID NO: 188 - DNA, 21 bp, Artificial Sequence
  Primer
tggagctagagcagtagatga

SEQ ID NO: 189 - DNA, 20 bp, Artificial Sequence
  Primer
atgcattgtaaccagaacat

SEQ ID NO: 190 - DNA, 20 bp, Artificial Sequence
  Primer
tgttgatgagcatgtcatgt

SEQ ID NO: 191 - DNA, 20 bp, Artificial Sequence
  Primer
taggtcaccttattctcagt

SEQ ID NO: 192 - DNA, 22 bp, Artificial Sequence
  Primer
ccattaggcaggtgctgattaa

SEQ ID NO: 193 - DNA, 20 bp, Artificial Sequence
  Primer
aaatggtctagtccccactt

SEQ ID NO: 194 - DNA, 30 bp, Artificial Sequence
  Primer
ggaacatcgtgggttatattttctgaaggc

SEQ ID NO: 195 - DNA, 20 bp, Artificial Sequence
  Primer
cctactaatgaaatgctagg

SEQ ID NO: 196 - DNA, 30 bp, Artificial Sequence
  Primer
tgttgatgtgacaatggggactggtgaccc

SEQ ID NO: 197 - DNA, 20 bp, Artificial Sequence
  Primer
agactgttggcagtttcaga

SEQ ID NO: 198 - DNA, 20 bp, Artificial Sequence
  Primer
ttttactgagaacctatcag

SEQ ID NO: 199 - DNA, 20 bp, Artificial Sequence
  Primer
ggttgtccaatttttatggt

SEQ ID NO: 200 - DNA, 20 bp, Artificial Sequence
  Primer
gggagtaattacttgaatat

SEQ ID NO: 201 - DNA, 21 bp, Artificial Sequence
  Primer
gcttttcctgatgtgattaca

SEQ ID NO: 202 - DNA, 21 bp, Artificial Sequence
  Primer
gcctctaaaatgtgcagattt

SEQ ID NO: 203 - DNA, 20 bp, Artificial Sequence
  Primer
ctaacttctgccatggtgat

SEQ ID NO: 204 - DNA, 30 bp, Artificial Sequence
  Primer
ggtgggtcttttcaaagtctcacgtttcca

SEQ ID NO: 205 - DNA, 20 bp, Artificial Sequence
  Primer
cgctttctgggattctctat

SEQ ID NO: 206 - DNA, 20 bp, Artificial Sequence
  Primer
tgggaatactaagcaggaca

SEQ ID NO: 207 - DNA, 20 bp, Artificial Sequence
  Primer
gttatagagtccaagttcag

SEQ ID NO: 208 - DNA, 20 bp, Artificial Sequence
  Primer
accatgacaaaccgaatatc

SEQ ID NO: 209 - DNA, 20 bp, Artificial Sequence
  Primer
cagattagctgatatagcta

SEQ ID NO: 210 - DNA, 25 bp, Artificial Sequence
  Primer
cttgtgaagttaggaattggctacc

SEQ ID NO: 211 - DNA, 25 bp, Artificial Sequence
  Primer
gagcttgcctcattgctgagtgagc

SEQ ID NO: 212 - DNA, 20 bp, Artificial Sequence
  Primer
tgattacctgtctccctgaa

SEQ ID NO: 213 - DNA, 20 bp, Artificial Sequence
  Primer
ctgctcttcggagacaaata

SEQ ID NO: 214 - DNA, 21 bp, Artificial Sequence
  Primer
tccatactgccttgtttgcta

SEQ ID NO: 215 - DNA, 21 bp, Artificial Sequence
  Primer
cagtctaaaaggtgtcaaagg

SEQ ID NO: 216 - DNA, 30 bp, Artificial Sequence
  Primer
cctggaaagttcaaacaggaaatagtgcat

SEQ ID NO: 217 - DNA, 20 bp, Artificial Sequence
  Primer
aatagcacggtaggacctat

SEQ ID NO: 218 - DNA, 20 bp, Artificial Sequence
  Primer
ccaggcaatgttcttgagct

SEQ ID NO: 219 - DNA, 20 bp, Artificial Sequence
  Primer
ataggccatttaaagagaag

SEQ ID NO: 220 - DNA, 20 bp, Artificial Sequence
  Primer
agcacaagatgcttttgcaa

SEQ ID NO: 221 - DNA, 18 bp, Artificial Sequence
  Primer
catgatggcatcaccgca

SEQ ID NO: 222 - DNA, 20 bp, Artificial Sequence
  Primer
atctgcagatctttaaagct

SEQ ID NO: 223 - DNA, 17 bp, Artificial Sequence
  Primer
cctctcctggcccaatg

SEQ ID NO: 224 - DNA, 19 bp, Artificial Sequence
  Primer
tcttgcataaggacaggtg

SEQ ID NO: 225 - DNA, 20 bp, Artificial Sequence
  Primer
ccatgactagaccttggtgt

SEQ ID NO: 226 - DNA, 20 bp, Artificial Sequence
  Primer
cagcatgcttcagtacagtt

SEQ ID NO: 227 - DNA, 20 bp, Artificial Sequence
  Primer
ctagaaagagagtccctaga

SEQ ID NO: 228 - DNA, 21 bp, Artificial Sequence
  Primer
tctgctgttttctgtttgagc

SEQ ID NO: 229 - DNA, 20 bp, Artificial Sequence
  Primer
ctttcgtcttcgtcttcggc

SEQ ID NO: 230 - DNA, 19 bp, Artificial Sequence
  Primer
gccatgttggactgacaga

SEQ ID NO: 231 - DNA, 20 bp, Artificial Sequence
  Primer
cttcccagtagcacgtagat

SEQ ID NO: 232 - DNA, 20 bp, Artificial Sequence
  Primer
ctcattctgtcccagattct

SEQ ID NO: 233 - DNA, 20 bp, Artificial Sequence
  Primer
gtaattccctgaaaaagaga

SEQ ID NO: 234 - DNA, 20 bp, Artificial Sequence
  Primer
gttaggaatcttcacacgtt

SEQ ID NO: 235 - DNA, 20 bp, Artificial Sequence
  Primer
ttaggcacaagcaaggtgct

SEQ ID NO: 236 - DNA, 20 bp, Artificial Sequence
  Primer
atttcttgatctctgtgcag

SEQ ID NO: 237 - DNA, 20 bp, Artificial Sequence
  Primer
acatattaatcccatggcac

SEQ ID NO: 238 - DNA, 20 bp, Artificial Sequence
  Primer
gtctgttcttcatgagctgt

SEQ ID NO: 239 - DNA, 20 bp, Artificial Sequence
  Primer
acttggaagtctggatcagt

SEQ ID NO: 240 - DNA, 20 bp, Artificial Sequence
  Primer
atagcttctctgacaggggt

SEQ ID NO: 241 - DNA, 20 bp, Artificial Sequence
  Primer
tacacatgtggctgacactt

SEQ ID NO: 242 - DNA, 20 bp, Artificial Sequence
  Primer
taacctccaacaggtagagt

SEQ ID NO: 243 - DNA, 20 bp, Artificial Sequence
  Primer
taccttccacatcagctgtt

SEQ ID NO: 244 - DNA, 30 bp, Artificial Sequence
  Primer
tccatcactggtatgtttcaattattttaa

SEQ ID NO: 245 - DNA, 21 bp, Artificial Sequence
  Primer
aaagttcccctgggacccgct

SEQ ID NO: 246 - DNA, 20 bp, Artificial Sequence
  Primer
ttatactctctattaggcac

SEQ ID NO: 247 - DNA, 20 bp, Artificial Sequence
  Primer
ggagtaacctcttgatagca

SEQ ID NO: 248 - DNA, 20 bp, Artificial Sequence
  Primer
ttcatcgagtttagagcctg

SEQ ID NO: 249 - DNA, 20 bp, Artificial Sequence
  Primer
gaatgtagagcttggaaggt

SEQ ID NO: 250 - DNA, 20 bp, Artificial Sequence
  Primer
ttcctttcctgtgctctgta

SEQ ID NO: 251 - DNA, 20 bp, Artificial Sequence
  Primer
cttccatgcttaggagagta

SEQ ID NO: 252 - DNA, 20 bp, Artificial Sequence
  Primer
aggttctgcactaagattga

SEQ ID NO: 253 - DNA, 21 bp, Artificial Sequence
  Primer
gaaatataaggtgtagtaagg

SEQ ID NO: 254 - DNA, 21 bp, Artificial Sequence
  Primer
ctcaaaacatgaagcatgtcg

SEQ ID NO: 255 - DNA, 20 bp, Artificial Sequence
  Primer
aaaactgctttccttatcac

SEQ ID NO: 256 - DNA, 20 bp, Artificial Sequence
  Primer
gcctaatcaatttgcatgca

SEQ ID NO: 257 - DNA, 20 bp, Artificial Sequence
  Primer
cagaatatcagcattgggaa

SEQ ID NO: 258 - DNA, 20 bp, Artificial Sequence
  Primer
ccctttgcatttggctgaga

SEQ ID NO: 259 - DNA, 20 bp, Artificial Sequence
  Primer
tcattgaccagagagaaagg

SEQ ID NO: 260 - DNA, 26 bp, Artificial Sequence
  Primer
catcacggtttgtcacatggaagtag

SEQ ID NO: 261 - DNA, 20 bp, Artificial Sequence
  Primer
gccacaaattccagtcacat

SEQ ID NO: 262 - DNA, 25 bp, Artificial Sequence
  Primer
gttagctcatgccagtctaactccc

SEQ ID NO: 263 - DNA, 20 bp, Artificial Sequence
  Primer
tggaaaagagtgtcctgcat

SEQ ID NO: 264 - DNA, 20 bp, Artificial Sequence
  Primer
catatgacaatgaaatcctg

SEQ ID NO: 265 - DNA, 20 bp, Artificial Sequence
  Primer
actactactttcagagactt

SEQ ID NO: 266 - DNA, 20 bp, Artificial Sequence
  Primer
aaaccctctcatcttagagt

SEQ ID NO: 267 - DNA, 21 bp, Artificial Sequence
  Primer
ccactagcaaaagaagtaaac

SEQ ID NO: 268 - DNA, 21 bp, Artificial Sequence
  Primer
cactacatgggaagggtaaag

SEQ ID NO: 269 - DNA, 20 bp, Artificial Sequence
  Primer
gacgagacttctttctacct

SEQ ID NO: 270 - DNA, 24 bp, Artificial Sequence
  Primer
ctgcctcactgaggtctgagttcc

SEQ ID NO: 271 - DNA, 20 bp, Artificial Sequence
  Primer
atcttctaggcacctactct

SEQ ID NO: 272 - DNA, 20 bp, Artificial Sequence
  Primer
cccagtactttaaatgcctg

SEQ ID NO: 273 - DNA, 20 bp, Artificial Sequence
  Primer
tccaagtctatcctccttga

SEQ ID NO: 274 - DNA, 20 bp, Artificial Sequence
  Primer
cactctgataagattgattg

SEQ ID NO: 275 - DNA, 22 bp, Artificial Sequence
  Primer
ccacacagtattctatattttc

SEQ ID NO: 276 - DNA, 30 bp, Artificial Sequence
  Primer
ctctctttatttccccctgcaacaaaggtg

SEQ ID NO: 277 - DNA, 30 bp, Artificial Sequence
  Primer
tgttctctcctggtgaaccaatgggatccg

SEQ ID NO: 278 - DNA, 20 bp, Artificial Sequence
  Primer
gtatttgtctccgaagagca

SEQ ID NO: 279 - DNA, 20 bp, Artificial Sequence
  Primer
aatcttcgcaacttgtcggt

SEQ ID NO: 280 - DNA, 21 bp, Artificial Sequence
  Primer
ttctctaggaatctgtctaac

SEQ ID NO: 281 - DNA, 21 bp, Artificial Sequence
  Primer
tcagatcctaccaatcctgtg

SEQ ID NO: 282 - DNA, 22 bp, Artificial Sequence
  Primer
ggtgctgactatacaggcatgg

SEQ ID NO: 283 - DNA, 20 bp, Artificial Sequence
  Primer
aagacatgtgaagaggggta

SEQ ID NO: 284 - DNA, 20 bp, Artificial Sequence
  Primer
ggaaccggtaagaggacata

SEQ ID NO: 285 - DNA, 20 bp, Artificial Sequence
  Primer
cagttagcatttgcttctca

SEQ ID NO: 286 - DNA, 20 bp, Artificial Sequence
  Primer
tcttgctaccctgtttgaat

SEQ ID NO: 287 - DNA, 21 bp, Artificial Sequence
  Primer
ttcattgctatgttcaaagac

SEQ ID NO: 288 - DNA, 20 bp, Artificial Sequence
  Primer
aaagtgatcctgaactaaca

SEQ ID NO: 289 - DNA, 20 bp, Artificial Sequence
  Primer
gcacctgggaagtttacaca

SEQ ID NO: 290 - DNA, 26 bp, Artificial Sequence
  Primer
gtcaattttacttaactgaaatatca

SEQ ID NO: 291 - DNA, 20 bp, Artificial Sequence
  Primer
ctgggaagaacccaggaaga

SEQ ID NO: 292 - DNA, 20 bp, Artificial Sequence
  Primer
ttgagacctacgtgagcatt

SEQ ID NO: 293 - DNA, 20 bp, Artificial Sequence
  Primer
aagcctgcatttggtatgct

SEQ ID NO: 294 - DNA, 21 bp, Artificial Sequence
  Primer
aggcattttctcctcaatact

SEQ ID NO: 295 - DNA, 21 bp, Artificial Sequence
  Primer
gaatagctcatactagtcctg

SEQ ID NO: 296 - DNA, 20 bp, Artificial Sequence
  Primer
tactacccagcctctgagta

SEQ ID NO: 297 - DNA, 20 bp, Artificial Sequence
  Primer
gctctgcatttctatcatcc

SEQ ID NO: 298 - DNA, 21 bp, Artificial Sequence
  Primer
cagatttgccattttgtttcc

SEQ ID NO: 299 - DNA, 20 bp, Artificial Sequence
  Primer
taagccataataaaggttaa

SEQ ID NO: 300 - DNA, 20 bp, Artificial Sequence
  Primer
gttgaggaatgcaacttgaa

SEQ ID NO: 301 - DNA, 20 bp, Artificial Sequence
  Primer
agtgacctagggcaacacat

SEQ ID NO: 302 - DNA, 20 bp, Artificial Sequence
  Primer
aggtagagagatggccttat

SEQ ID NO: 303 - DNA, 20 bp, Artificial Sequence
  Primer
aatgcaggagatattcagga

SEQ ID NO: 304 - DNA, 20 bp, Artificial Sequence
  Primer
tcagatctcacggtagtcta

SEQ ID NO: 305 - DNA, 20 bp, Artificial Sequence
  Primer
ggtagctagaaactagtcct

SEQ ID NO: 306 - DNA, 20 bp, Artificial Sequence
  Primer
tcccagtgtccagtgttgat

SEQ ID NO: 307 - DNA, 20 bp, Artificial Sequence
  Primer
tccaactttttctcctcacc

SEQ ID NO: 308 - DNA, 20 bp, Artificial Sequence
  Primer
gagtggtgaatgactctcta

SEQ ID NO: 309 - DNA, 20 bp, Artificial Sequence
  Primer
gtggatccaatttccacgta

SEQ ID NO: 310 - DNA, 25 bp, Artificial Sequence
  Primer
gattcagaaatgatctatgccatca

SEQ ID NO: 311 - DNA, 21 bp, Artificial Sequence
  Primer
ccaagaatgtttccatcaagt

SEQ ID NO: 312 - DNA, 20 bp, Artificial Sequence
  Primer
ttatcaactgcaacctcaga

SEQ ID NO: 313 - DNA, 20 bp, Artificial Sequence
  Primer
gtatgtaacaggtgacctga

SEQ ID NO: 314 - DNA, 20 bp, Artificial Sequence
  Primer
gagaagatctttggtctaga

SEQ ID NO: 315 - DNA, 20 bp, Artificial Sequence
  Primer
ggtatcacttttgcctcgtt

SEQ ID NO: 316 - DNA, 21 bp, Artificial Sequence
  Primer
gtgtgagttggtccatacagg

SEQ ID NO: 317 - DNA, 24 bp, Artificial Sequence
  Primer
cagtcatcctcttaaccccagatg

SEQ ID NO: 318 - DNA, 25 bp, Artificial Sequence
  Primer
cgcaaggtggagagccgcggggaag

SEQ ID NO: 319 - DNA, 22 bp, Artificial Sequence
  Primer
tggagctggtatgctggttagg

SEQ ID NO: 320 - DNA, 20 bp, Artificial Sequence
  Primer
ggatgaagaaccaggaggcc

SEQ ID NO: 321 - DNA, 20 bp, Artificial Sequence
  Primer
caaggtggagagccgtgggg

SEQ ID NO: 322 - DNA, 21 bp, Artificial Sequence
  Primer
cagccatgaagcaggagcagc

SEQ ID NO: 323 - DNA, 25 bp, Artificial Sequence
  Primer
cttcatataaccagtcagcaatccc

SEQ ID NO: 324 - DNA, 25 bp, Artificial Sequence
  Primer
cttcatataaccagtcagcaatccc

SEQ ID NO: 325 - DNA, 25 bp, Artificial Sequence
  Primer
cttcatataaccagtcagcaatccc

SEQ ID NO: 326 - DNA, 25 bp, Artificial Sequence
  Primer
cttcatataaccagtcagcaatccc

SEQ ID NO: 327 - DNA, 20 bp, Artificial Sequence
  Primer
tcttcttctggttcctgtgg

SEQ ID NO: 328 - DNA, 25 bp, Artificial Sequence
  Primer
cttcatataaccagtcagcaatccc

SEQ ID NO: 329 - DNA, 25 bp, Artificial Sequence
  Primer
cttcatataaccagtcagcaatccc

SEQ ID NO: 330 - DNA, 22 bp, Artificial Sequence
  Primer
ccctttgtaaagctgcataagc

SEQ ID NO: 331 - DNA, 19 bp, Artificial Sequence
  Primer
cgtactatgtaggctgacc

SEQ ID NO: 332 - DNA, 20 bp, Artificial Sequence
  Primer
caaccctttgacctctctca

SEQ ID NO: 333 - DNA, 20 bp, Artificial Sequence
  Primer
gactggcatgagctaactac

SEQ ID NO: 334 - DNA, 21 bp, Artificial Sequence
  Primer
gatatcgcaccaaagctagac

SEQ ID NO: 335 - DNA, 20 bp, Artificial Sequence
  Primer
tagtgctctggcattgactg

SEQ ID NO: 336 - DNA, 21 bp, Artificial Sequence
  Primer
gtgttctcagatcactttggg

SEQ ID NO: 337 - DNA, 19 bp, Artificial Sequence
  Primer
gcaagagaatgatggtcag

SEQ ID NO: 338 - DNA, 20 bp, Artificial Sequence
  Primer
gatttgattacctgtctccc

SEQ ID NO: 339 - DNA, 20 bp, Artificial Sequence
  Primer
ccagttttctctcaactgcg

SEQ ID NO: 340 - DNA, 20 bp, Artificial Sequence
  Primer
cggctctgtaaaatcttcgc

SEQ ID NO: 341 - DNA, 20 bp, Artificial Sequence
  Primer
ttcgcaggtagctgtgtatg

SEQ ID NO: 342 - DNA, 21 bp, Artificial Sequence
  Primer
gatcttggcatacgatgaaac

SEQ ID NO: 343 - DNA, 21 bp, Artificial Sequence
  Primer
gtccgtcagcaatgattcatc

SEQ ID NO: 344 - DNA, 22 bp, Artificial Sequence
  Primer
cacaatgctattaacagaagcc

SEQ ID NO: 345 - DNA, 20 bp, Artificial Sequence
  Primer
aagaatttgcaggcttggcg

SEQ ID NO: 346 - DNA, 19 bp, Artificial Sequence
  Primer
tgctaaataccgcaggcac

SEQ ID NO: 347 - DNA, 20 bp, Artificial Sequence
  Primer
tgagaatatctggcgcagtg

SEQ ID NO: 348 - DNA, 20 bp, Artificial Sequence
  Primer
gggaagtaaacctgatcgtg

SEQ ID NO: 349 - DNA, 20 bp, Artificial Sequence
  Primer
gggaagtaaacctgatcgtg

SEQ ID NO: 350 - DNA, 21 bp, Artificial Sequence
  Primer
cgggagataattgtgatgagg

SEQ ID NO: 351 - DNA, 19 bp, Artificial Sequence
  Primer
acgggaaacaagcaaggag

SEQ ID NO: 352 - DNA, 20 bp, Artificial Sequence
  Primer
agtgggtttcatggggaaac

SEQ ID NO: 353 - DNA, 20 bp, Artificial Sequence
  Primer
ccctctaggtttagcagtac

SEQ ID NO: 354 - DNA, 19 bp, Artificial Sequence
  Primer
tcagcgtgatcaacactgg

SEQ ID NO: 355 - DNA, 21 bp, Artificial Sequence
  Primer
caaacttgctccagtttctcc

SEQ ID NO: 356 - DNA, 20 bp, Artificial Sequence
  Primer
acaactccccaatagcaacc

SEQ ID NO: 357 - DNA, 21 bp, Artificial Sequence
  Primer
gaccttgttgagaggcattac

SEQ ID NO: 358 - DNA, 19 bp, Artificial Sequence
  Primer
gtctcctctgtaaccacag

SEQ ID NO: 359 - DNA, 20 bp, Artificial Sequence
  Primer
gtctcctctgtaaccacagc

SEQ ID NO: 360 - DNA, 20 bp, Artificial Sequence
  Primer
tgaacagctgatgtggaagg

SEQ ID NO: 361 - DNA, 20 bp, Artificial Sequence
  Primer
acctcttttactccgcacag

SEQ ID NO: 362 - DNA, 18 bp, Artificial Sequence
  Primer
acacagggttgagtggag

SEQ ID NO: 363 - DNA, 21 bp, Artificial Sequence
  Primer
gggtaagcaataccaagactg

SEQ ID NO: 364 - DNA, 20 bp, Artificial Sequence
  Primer
tttaaccacgaagtgcttcc

SEQ ID NO: 365 - DNA, 20 bp, Artificial Sequence
  Primer
agtctactgtgttgctaggg

SEQ ID NO: 366 - DNA, 21 bp, Artificial Sequence
  Primer
gatatcgcaccaaagctagac

SEQ ID NO: 367 - DNA, 20 bp, Artificial Sequence
  Primer
acagagaggtgaccatttgg

SEQ ID NO: 368 - DNA, 20 bp, Artificial Sequence
  Primer
caatggctgcagttagaagg

SEQ ID NO: 369 - DNA, 20 bp, Artificial Sequence
  Primer
ctcaagtttgctacccatgg

SEQ ID NO: 370 - DNA, 21 bp, Artificial Sequence
  Primer
taccagctactttcttgaagg

SEQ ID NO: 371 - DNA, 21 bp, Artificial Sequence
  Primer
gcaatatgataaagaggaggc

SEQ ID NO: 372 - DNA, 20 bp, Artificial Sequence
  Primer
aaagagacaggtggagagag

SEQ ID NO: 373 - DNA, 20 bp, Artificial Sequence
  Primer
gctgaatcgaaaggaagtgc

SEQ ID NO: 374 - DNA, 24 bp, Artificial Sequence
  Primer
ctgaattagtgattactctgcagg

SEQ ID NO: 375 - DNA, 19 bp, Artificial Sequence
  Primer
gactaggactatggtaagc

SEQ ID NO: 376 - DNA, 21 bp, Artificial Sequence
  Primer
cctgttgttcttctttggagc

SEQ ID NO: 377 - DNA, 20 bp, Artificial Sequence
  Primer
cccaatcatttagctgtacc

SEQ ID NO: 378 - DNA, 20 bp, Artificial Sequence
  Primer
ttgcgtcattgctgagtgag

SEQ ID NO: 379 - DNA, 20 bp, Artificial Sequence
  Primer
ctcatgctttggtgatgacg

SEQ ID NO: 380 - DNA, 18 bp, Artificial Sequence
  Primer
aaggggaggaaagatgcc

SEQ ID NO: 381 - DNA, 20 bp, Artificial Sequence
  Primer
agcaagttgtgcataagcag

SEQ ID NO: 382 - DNA, 20 bp, Artificial Sequence
  Primer
agcaagttgtgcataagcag

SEQ ID NO: 383 - DNA, 20 bp, Artificial Sequence
  Primer
tcatcttttccagggttggg

SEQ ID NO: 384 - DNA, 20 bp, Artificial Sequence
  Primer
tcatcatttctggggcactg

SEQ ID NO: 385 - DNA, 22 bp, Artificial Sequence
  Primer
aatttatggaggcgagatgatg

SEQ ID NO: 386 - DNA, 20 bp, Artificial Sequence
  Primer
ggttaaggaacattcgctgg

SEQ ID NO: 387 - DNA, 19 bp, Artificial Sequence
  Primer
ccggaattcctgacaatgg

SEQ ID NO: 388 - DNA, 21 bp, Artificial Sequence
  Primer
taaagaatgcccagctcacct

SEQ ID NO: 389 - DNA, 21 bp, Artificial Sequence
  Primer
cccttggagaaactttcactg

SEQ ID NO: 390 - DNA, 20 bp, Artificial Sequence
  Primer
ccagtgtctaacgattaggc

SEQ ID NO: 391 - DNA, 21 bp, Artificial Sequence
  Primer
gcaaagtgggattaaatcagg

SEQ ID NO: 392 - DNA, 20 bp, Artificial Sequence
  Primer
caaagtgggattaaatcagg

SEQ ID NO: 393 - DNA, 20 bp, Artificial Sequence
  Primer
ggcttcacagttggaattgc

SEQ ID NO: 394 - DNA, 21 bp, Artificial Sequence
  Primer
cagcaatcgattcctttgtgc

SEQ ID NO: 395 - DNA, 21 bp, Artificial Sequence
  Primer
tgcttggatcatggcattgcc

SEQ ID NO: 396 - DNA, 18 bp, Artificial Sequence
  Primer
ggatggagatgttctgag

SEQ ID NO: 397 - DNA, 20 bp, Artificial Sequence
  Primer
aagtttacataatagttttt

SEQ ID NO: 398 - DNA, 19 bp, Artificial Sequence
  Primer
ttgacctctctcatacaaa

SEQ ID NO: 399 - DNA, 15 bp, Artificial Sequence
  Primer
ccagtttgtcccagg

SEQ ID NO: 400 - DNA, 16 bp, Artificial Sequence
  Primer
ccattgctttccttga

SEQ ID NO: 401 - DNA, 14 bp, Artificial Sequence
  Primer
ggcattgactgccc

SEQ ID NO: 402 - DNA, 20 bp, Artificial Sequence
  Primer
gaaggtagcaacattctttt

SEQ ID NO: 403 - DNA, 20 bp, Artificial Sequence
  Primer
taaattagtatttaaagacc

SEQ ID NO: 404 - DNA, 17 bp, Artificial Sequence
  Primer
ttacctgtctccctcaa

SEQ ID NO: 405 - DNA, 16 bp, Artificial Sequence
  Primer
cttagatggtcgaggc

SEQ ID NO: 406 - DNA, 15 bp, Artificial Sequence
  Primer
acctggtgttacggg

SEQ ID NO: 407 - DNA, 19 bp, Artificial Sequence
  Primer
ccagttttattgtttttcc

SEQ ID NO: 408 - DNA, 17 bp, Artificial Sequence
  Primer
gcaagttagcgttgtca

SEQ ID NO: 409 - DNA, 20 bp, Artificial Sequence
  Primer
gattataaaaagcctcacta

SEQ ID NO: 410 - DNA, 20 bp, Artificial Sequence
  Primer
gaaataatgaatcagcaata

SEQ ID NO: 411 - DNA, 16 bp, Artificial Sequence
  Primer
ccctgcaacaaagatg

SEQ ID NO: 412 - DNA, 15 bp, Artificial Sequence
  Primer
tcctggcacaatgct

SEQ ID NO: 413 - DNA, 17 bp, Artificial Sequence
  Primer
agcataattattccccc

SEQ ID NO: 414 - DNA, 17 bp, Artificial Sequence
  Primer
tgtactgaagcatgctg

SEQ ID NO: 415 - DNA, 19 bp, Artificial Sequence
  Primer
tgaaattggaaattgtctt

SEQ ID NO: 416 - DNA, 18 bp, Artificial Sequence
  Primer
gctgttttctgttttagc

SEQ ID NO: 417 - DNA, 18 bp, Artificial Sequence
  Primer
ttgcacacaacaacataa

SEQ ID NO: 418 - DNA, 18 bp, Artificial Sequence
  Primer
tttcttgatctctgtgga

SEQ ID NO: 419 - DNA, 19 bp, Artificial Sequence
  Primer
catattaatcccattgcac

SEQ ID NO: 420 - DNA, 462586 bp, Homo sapiens
  misc_feature (178479)..(178488): n = a or g or t or c
  misc_feature (251512)..(251519): n = a or g or t or c
  misc_feature (337530)..(337533): n = a or g or t or c
  misc_feature (338176)..(338186): n = a or g or t or c
  misc_feature (321708)..(321708): n = a or g or t or c
ggcaaaacaaacgaaatcactcatcttcccccagcatgccttgctatctcatgactcactgtgttgtcatctgtgcctcaggaggccgaggtgctcccatcctccccacagccttagctcctgctccctcctgggggacccttgcatacattaagggcttgtgaaggctgattgtctttgggggttatgtcttctctcttctatatacccgtggcaccttgtattttatgacatttgtcaagttttaaaaaattgtttatctgttttcttcctaattgtgagcccttgaggacaggggccttgtcttctctttctcatgctatgctagctcagggttcacctcaccatttgtgcttcttcaatacccgtaggctaagttaatggctgcgttcaattttttttcccaaccagttacatctctgctcggacccaagatagtttactcagtgaagaggatatgcttctgcatttttgcagctcttctcttaagttacctgaaaataccaccaggagaagcttacgacaaccttgccattgctgttgtcacctccaggtagggtgtcccttcattgctgctgtcattttgccagacttaacctttataagaaaacacatgctaacctctatcaatcttcagcttatttctttaatctacctgcactggtcacatttgctcatgaaagtacagaaagaataattagttttttatgggtcttagagttatggaaatgttgagcttcatggtaccttagaaattaatgagaatcaacatttcatccatggatcaggaaactgtgtgacccaagagaagggaagcggcttctcagggtcacacagtgggtcagtgatagagctagaattagtgcctagcgcttcagatgcattattagtgctttttctaatttttgttagtgcatttcactcacactcacacacacacacacggttttccagctatagaattccttctaatgaaatagaaaattgcacaaaagtttaagtacttagtgctaagatatttgaatttataaagctctttgaatttttggaggtctacgggtgctccaacaggaattttgttagaaggtataacattagcaatgttaatgagggaaattcttcattatgtgggactgtctggagccttgcaggccatttggcagtcttgccacccccaaatcccaagatattgtgacacccccacccctatgcttgcttacatttccaaacactcttgatagtggcattattgcccaattgagaatcactttgtgattctcagagcaaaagaggtatagaggggttgatttatttgatttgcttgataagtaagtttctgcctggaacaatgagtgaactcagctaaatccacagacagggctgttagtaacactgggactgggctgattcttgcaaccactggttgtatgctcttttcatcagataattgacttatttctaacttagtccatactatgccccactcaatgatgtccatgcttcaccagggattgctaataggatggagagatgggagggaaagagcaaggagctggggctcagagaaggagaacacatggaagaggactcatgaggcagcaaaactccacagtcattcaaaacacacctgcaggaatctttcctgctgctaaaattcccccaaggtctgaaaaggatggaacacaccaatttgagttacaaaaatctttaaaaatgcacgtcgggtacacctcatcactgccaagcaatagcgaatgcagtgatgtggcttctgcagtactttgctctgttaaagtttatcttcttaaaaatttgtcttccgagttggcttataaatgccaattatttccatggggatggaaaccaaggcatcccttttaggtgggaatgtggagaggtcatgattatttaaacagagaattttgtggagagctggcataaggcttgagaagtgttgttattgctcaaagaacctgcaaactgcagggagaatctggatctgtgcaggataacagataatagagctttttggtcctgactgatttacttgaaaggaaaggggagggacaggatgctggctgcagggctggatggcttggggagggcacagggtgatgggagacaggaatggggggttgctcttgctctgtcaccaggctccatacataaaagcttcctgtatcatgagcttatttccaacatctcaattgactcaagacctacggcatgagtaaggccacagaagtggagttatgttccactttcttgagagtgaagtatacatgtaaattattagaaatcggtctgcacggtagatttgtctattcttaccattaatcatataaatttatatttgacttaatgaattaatatttatattaaatttactagttaatatttataagatcttagtatctataagatcttaaatgaattattttcccaattaattaaatcatactgtacagactcattatatttactttatacttcaggtaataattcaatactacttattttgttgttctttctgttggcttatgtgtcctttgtatccctccattactgtgcttttttaaaaaaaaattttcagaactcctttatattctggaactatgaattgctgcaggttcatcttacatatttcctgacccagtcctagagtcatttctcctaggagcccatgtccttttattggaggatgatattagaagccaagatttggatgttacgtgtgttctgccactgggattttgttgcttctaggctaccttggctgacagaaaaaagaaatatatgtgtgtatactaaactgtttatatacacatatctataaatatctctaatgtaaccatctgtatttatattaaatataatatgaatttgtgctaatgtttctcactctaatctattacacatacaccattctagccttctctccttgcatactgcaaccttccacttcaacagtgaaaaatctggccctcaccatcttccatttcatttacctagtcattcaattccagcatacatgaatagtagtttcagaagtgttaacctgtacctccaggggaaatcaatttatcatcgagaggacagtgtttatgtgcagctccttttgccttagtcttacatgctccactcatttccaaagttacataggtcagcaccttttcctcagtccctttcagtgagattgtttcatacacttgttacacagtttgagttttaggtcgcatcctgcattccatcattgcattcctcaacatcctaaattatgatattttctcttgcatacattaaagttccctcatgccttaaaattctattggttttgataaatgcataatgtcatatgttcacaattacagtattacacagaatagtttcacccccctaaaaaaacttcctgtgcttcacttattcaaccctatctccccaaatccttggcaacaactgatctgtttaccatcttcatagttttgacttttgtagaatgtcgtataaaaggaactatagagtatacagcctttccaactggcatctcttacttagcagtatgcatttaagattcatccaagcattcgtgtggcttgatagcttattctttttttaatgctgaatggtattcctttgtatatatgtaccatagtttgtttatgtatttacctattgaaaggaatcttggttgcttccattttggggaattacagataaagctgttataaacattcatgtgctctgtgtgtgtgtgtgtgtgtccctaagtttttaaatcagttgagtaaataccaagaagtgcaattgctggattgtatggcaagtctatgtttagctttgtaagaaactgaaaaaactgtctttcaaattggctgtaccattttgcattcccactaccagtgaatgagagctcctatgtatctgcagccttgccagaaattagtattgtcggatagttccattttagacattctagtaagtacgtggtagcatctcactcttgtttatattaacatttccctaatgacaaccgatgttgagcatatttttacatgaaatctcacacttttttaaactatacattcttactaagagttgaagaaagatctctggccagctggctcagctacatccagcatgggtgatatctggacattcaaataagtctctgaagtctggaacagttgataaggatgtatttcagaagctggaaacatgaaggcatcagggcaggtggttggggtagttgcaccatgctgaattaagagtcaagaatcaggtctaacaggtaggcacccatttagggcaatgtcctgactgtttttctcacatcacatacattttccatatcctccttctccatttctacatatatatatatatgtatgtatgtgtgtgcgtgtatatatatgtacatatatatatatatatgtatatatatgtacatatatatatatatatatatatatatatatatatatatatatatctgtgaagccatcatcctgatcaaataatgaattcatcacttccaaaaatttcctcatgcccttttattgcatttccctcctacactttccctgcttcttggcctaggcaaacatttatttgctttctgtcactgtagattagtttgtattttctggagtcttatacaaatggaagtaagcagtatgtatttttttcttacttcctttactcagcatcatcaatttgaagataagccatatttttgcatgtatcaatggttcattattttttgttgctgaatagtattccattgtatgggttatactataatttgtttatctcttcccttactgatggacatttggtctattctaaataaagcttctatgaaaatcatgtaaattaatatatgctctcatttctctagctatgtgcaaatacttagaagtagaaggctgaatcatatgatggatatgtatataacctttaagaaactgccaaactgttttccaaagtgattgtaccattttacatcccaccagaagtatataagactttctttttttttacattcttgccaaagcttaaaataattgtttgctttagattttagtcattatgacagttgtatagtggtatctcattgtgactataatgttgagcgtcttgtcatatttatttgccatccatatatctttttcagtaaaatgtttgcataaactttttgtccattaaaaaaaaatggattgtttcattccttataaatgagttttgaaagttttttttttatgttgtggattcaagctgtttatcacagatatgattttttcttttttttttttaagatggagttttgatcttgttgaccaggctggagtgcaatggcatgatctcagctcactgcaccctcccacctcccaggttcaagagattctcctgcctcagcctcctgagtagctgggattacaggcatgcaccaccatgcctggctaatttttgtatttttagtagagacgaggtttctccatgttggtctggctggtctcgaactcctgacctcaggttatccgcccgcttcggcctccgaaagtgctgagattacaggtgtgaaccaacgcacccagcctatatgatttttaagtattttctctcagtctatggtttgtttttttgattatgttaacagaatcctttgaaaagagaagtttgaaattttggtgaagtcaaatttataaattttttttatggattttttttatgcttttgttgatttatctaagaaaactttgcctaacccaaagccacaaataatttcttttatattttattctagaagtactgtgattttaagtattacagttaggtccacaatttatttcaaattaatttttatatatggtgcaaggtatcgatcataatttttttttgtacatggccatctaattgttctaccaccgtttgctgagtaggctattcttttgctattaacttgtcttttcgtgtttgtcaaaatcagttgtccatatacatgtagatataattctgggctattctattccactgagccatggaaaaagccatagacaaatccttatgccaatctcataatttttatttttgaagctttgtaataaattttgaaatcaaatatcattttctcttcaactttattcctttctgtatctctcttttagtgtgtacccactatattgccatcacttattgacacaactctttaacctagtaggccaagagccctttgtaggtgggaagcatgacttactcattttttaaaacataaatcagaccatgccagccccctactcaacctgccaatggcatcctactgccagccccccattcaacctgccaacggcatcctactgctcttacacaggagccgtgccgcagagggacttattggccaaggtaaggactttggatacattctatctctctagtttcactcagtttctttgtggctgctgcatacacacaagcacattcctgtctcagtgactgtgcgcgcctttctccctcagcctggaaagctcttttcactgaggggcatgtgacttgccccttcttttcactgctcttacacacccacacagccaaggctttcctgacttctctttctggagtgtcttttctgtgatatctattcctctactctgattttttgtttttcaaaaaaaatttttattggatatttattagtttatttacagtttatttccttcagtagatgatgaaatctttataagtgaaagtcttttgtctgcttttttttttttttttttctgtatacccagcatttgaaactgtgtctggcacatagtggatgcttaaaaataaatctttggaactcattccttagtacaatgcttgctggataagaaaatgtaatgaaaagaattgatcgaggaagactgactgcttagaaaggcttgtttgcagggctggtgcttgactagcatctaggaacttggatttggggagagtctccaccatttccagaactgataaaagtggcttttatgcttaaactaaactgtttgtgcaaacaatatggcttatgctgaatacttgcttttcttttgggagtcttggaattttggtatatgctagtggagggttgcccatgtgacctgcccacaacaaaagcccctgagcagtaaatctctgaatgacttctctggtagacatttcacatgtgttatcataagttggtgctggaagaattaagcacgtcctgtgtgattctgatgcaggacaggagagtcccaaagttggggcttagcctgggagggttcctggctttgcccaggaaagaattcaagggcaagctggtggtgttagcaacttctattgaagtggcagtgtacagcagcaacagaggtgccactccttgcagagcagggctaccccagaggcagtgtgccaagagtagcagctcagaggcagttctgcagtcacatttatacacacttttacttatatgcaaattaaggagtgggttatgcaggaatttctagaaaaagagtggtaacctctgggtcatcaggtcattgccatggtaagaactggtaacttctgtgagttgccatggcaatggcaaactgatatggcacactggtgggcatgtcttatggagaagtattttcaccttttccctgttttagctagttctcaatctggtccagtgtccaagccccacttttggaatctggtcctgcctcctacttcaattccacagacagaagactcttggaagtttatgcctggtttcctccagacttcatcttatgcatttttccttttgctgattttgctctgtgtcctttcagtctgtttattagtcaggctatgatctcctccatttaatggctgtattattttagggaagttgtttaacctctccatacctatttcttcatatagaatgggaataatagcagtgtccactttatagtgttgctaagaggatggagagttaattccaaagacagctttacatgtgacctattatttcaggagcactaggtgctagcactgtgctacatacttagcaggtaagctgcaaggtcggctttgccaagctgctgagaactacactgtgagttctaggtctccatgcatccttcacatgggggctacatttgcaccagagcctgaagtggctgagtttcatgtggggactaaaggccctacctggctagaacagaaggagcaggtgtcaaggttacaacttgactctgtggggaacattcgagatcaatggaagtctgggtcttttaggtttctaaattattctgggaatcaatgtagggattcatacctcctccagcagttgccaatatgaatttctcctttcctcctttctctaatgctgagctccgtgaatgaccacttatatttaaattcaaatgtttatatatgaaatctttatacaggctgatttaatttttgtgttgctggaagagttaggggtgcagaatcctatatggtgatgtaactgaattctgcaagtggacagtgtattaacaagatgggttgggggccagggaatcttggtctctccaaagttgttctgtatggtagtcagcaatgggtagttctttactgcctgtttatctgccctgatgactgaagaatctgcatactgatatggcagacccattggattaaagactcctggactgcaaagtgcctgcatagaggccagacactctggaaagcctcctagtcccaaaacagacttgtttgagtaaaaagtgcaataaagtcttgatgtgtaattatggaattgtttgttattcagcatagattatcctagcatgactaacacacttgttttgctctatctgtcctgctccccgtcctctcacccccatttcaccctcctatactaggccaactatcctactgtctttcaattgtcaaattttagcaattttaaccaagctttttgttaacccctttgtcataacgacttaagaaagaaattttgggccaggcgcggtgcctcacgcctgtaatcccagcactttgggaggccgaggcgggcggatcacgaggtcaggagatcgagaccatcctggctaacacgatgaaaccccgtctccactaaaaatataaaaaaaattagccgggcgcggtgggggggcgcctgtactcccagctactggggaggctgaggcagaagaatggctgatcccgggaggtgaagcttgcagtgagctgagatcgcaccactgcactccagcctgggtgacagagcgagactctgtttaaaaaaaaaaaagaaagaaacattgttgtgagagaatgtgaggagggcaccttttataccttttatttaattagcattaaaattattttaaatcaccaagtgtattctctggtctgttgaatgactatttaattcaccctcaaagcagttgtactcctttgagtcaggcaaagtccccaagaacggccttctgccacaggagacagctccctctttctgccatttgttcacattactgatttatctatcatctgttcacattatctgcccatcatccatccgaagcggagaaaagtgccatcaccaaatttggtttctctattgtagtgtttttttgcttaggaacattataatgttcctaagaaacatcataatgaaatgaaatgaaagaaagctctcatttttcagggaactttctttcaaatgctaacaacgatagattagctttaatagcctttttcattaattgtctaaccagagtaaaaataagtcttgggagactgaatttactttcatatgcctctataatgtcaaggcactatggagtatctttaggactgaagccaatcccagaatccaaattgctttttctgagctatttgactctgttcttataactataatctcagtatgtcaattttgacatttttgtcggtagacgctgcactttaaaaatataaggtagggaattattaatggtattaaggggagatacagaaaaatcacccaatgtcatttacatctatcccatcaaaggatggataacaatctgtcatggaaggtttaagtgccctcctgctaggggcgaaagcagagacagcaggaatggtattaaactacatgaccccttaaggccctgttcacttttaggagctataaatgatgcatttcagagctggaagtatcatttcagataatctctttatatatgagaagaccagagcccatttgggggtgataacaactgttatggtgagatgagttcagaatccctgcttcattcaagatttagtaactttgatcacctaccatgtgccacgctggggctactgttgtcaaaaacatagagcacctgaccacatggggctcacgcctagtttttcattcatggctgtctttgtgctgcaacaaattggttcaaatttggaagttgtttttcttctagaccattcttcactctgagatgcaagagtgccctaatgtcttttggaccatgatattcttcccttaaaaaaatttactactttattttaagtattgcccctccattggatcttgttcatcagtgcagcagctctggggtagagaatacataaaattcttaatcccttgttgacaattgatttattatgtcatttttatagatgagaaaaatgaggctctgagagcctaaattacatgcccgtgacacagaaatcctaagtatgtgagatgagattctaatgcacgtctgtattaaagaatcctggacggcaaagtggctgcatggaggtcagacactctggaagcctccgagtccccaaacagacttgtttgaataaaaagtacaataaagtcttgatgagtaattatggaattgtttgttacccagcatagcttatcctagcctgactaatacagctgcttccaaagcttttaaccatcttctctccaagctactttaatatcccaactctgtgtattcttggagaatatgttctagaaaatcataataaatagagattctgtttcttctcagatattccttcttttccagcacactttcattggttctgattaactttgggaaatagcttcagtgaaacatttagggcattaagtcctctcagagtagaaaaggatgatttcaaggtgaaggggcagggagtattggaagcctagggttcaaaatctgtgactgagagggatgaccaagaaggccagactattttttttaagagctatactcagtgagtgaattctgaatggtacaaatgaggcttgttgctatgacaccaaatgattccatatttagtgcaatggaatccccatttgtgttcttaaaaaattaaagcagttttatggatattaaatgtttaagtggctctagcagctagaaagaaaaattgccttatgaataaaacagaccaatgcgtgattgcttgcatggaaagcatttgaaaaatgtgttttcagagtatggagcttggcagcttttgttttacagtgtgcaatgataggaggaaatgaatgaatgaatatataaatgattgtaggcaaactatggaatgaaaaaattgtgggagagaaattaaggttacttcaatacacttttttcctgagcatttattatgagttcagcaacatgcagggtgttggagcatgctaaagcagccccttgggtggagtttgactttactcttcctccattcatgtattagctaaaatgacactagcatatttgaccatgtactaaataaattccaagattccaatgtcttaatacagaagatgttttaataatcaagtttactgaggaataatttatataaagtgtacagttcaatgaacattaacaaagatttacaactaagtatacagcaccacagccaagacacagaatatttccatcaccccaaaaagttcccttatgctcttttggagtagttccctccttccacccccagaactgagcaactactgctctgatttctgttcctatgattttgacttctccagaatgttacattaatggaatcattcactatatagcttttgtgtgtgtgcctgtcttttttacatagcataatgctttttgagattcattcatgttcatatatatatatatatatatatctttaacacattttttattgctgaatggtattccattgtatgcatttgctgcaatatgtttattcatttaccaattaacaaccatttgggttgtttctagtttttacttattgtgaataaaacttcttaatcttgtacagatcttagtgtgaatcacagagtaaatttttctcacttatgcaaatgttcaatatgggttttctcaatggacaaaaacagctttttgtttttttcccacacagtaacttggaaatctaggcttcttttgtcttgtggctccctaaccatccagggccttggacttgtttgtttctaggcattggaaaggaaaaggatctacttcaagtactccatctcagaaaggaaccaaatcacttctacttatattctgctggtaagaactagatatgtggccaccccaggatgcaagggggctaggaaatttattccataaacaaccctatgctatggacaggggtgcattgattttgggtggaccaatattttctgataacacaatttatttgctcaccaaatattaattgagaatctaccaaatatcaagtactgggagataaagcaaggaccaaacaaataaaccaaaacaaatccaggccttaacatcttgtgtttatagtctggatagattttagggaagtataatgtgtatcttcatccagaaaacagtcactaggaataaaagtgccatatcagaaataatggaaaatggaaaagatatgaaaattataaaataatagatgaagggaaaatcactggaaatgggggagggaaatctccctggaggggataaattttcatttgggtcttaaagatgcaagaaatgtggataggtagatggcggtggagtgggaatttcaaaagaaataaataatccaaaaaagggagtggaagaagccatatgccttgggtatgccttgcttgggggtggcaaaagaaatttatctgacttccctgctttgttaagctgccacatgctgaccttccagccatagtgcatttaagttgctttctaaggaagttctattcaatttgactgcttaatggctgctgccgttttatggatggtgattgaatgtttcaaaacgtggaattgcataccccatggtgaaacttcttcataagatgaataagtagtgccatcaccttgaaggagttttctaaatattaatagaattaaataaattaagacaacaagaagaaagctactccttttaaagaacggtttggagctagatcatgccaattacaaattaaatccttgactgtttaaatctacagctctattaatactctaatatgccatattattagttcacagatgctggccccatggcacaagcaggtaacaaaaaaagaggactgtgagttctgccacaactggcttgtttgctgccacagcctctgaagaatgccttgacctccacttacctctcaaatctcagatgaactgatttcacttacacagcctcaatttcattcatattcctagatccaagagagtctaggaaatgtagattttagtcttttagtgtttctgacttaggacatggaagggctaagtggctatcattgctaaaccccaattggcaacaactagtccaattaaatttcttttttggctccctcactttttttttttgtctttctggcagttgaagagaaagagtttttttgtttgtttgtttgtttgagacagagtcttgctctgtcgtccaggctggagtgcagtggtgtgatctcggctcactgcaacttccacctcccaggttcaagcaattctctgcctcagcctcccaagtagctgggattacaggtgtccgccaccatgcctggctaatttttgtatttttagtagagacggggtttcaccatcttggccaggcttgtcttgaactcctgacctcatgatccacccatctcggcctcccaaagtgctgggattatagacacgagccaccgtgcccagccgagaaagagtttcatgtaaacatgccatagaaagagagacattgagacattattattcttttaaataggagagttcttgtatttttatttgattacattcttataaaaaccagtattaaaagaaaaccaattttaaaagaacaccaattaaaaccaattacaattcggattgtccatggaaattgatatcacatagtactaggacttctgcatcatggacacactagactttttatgcagtggctgtgttcctcatacatctttgctgcatctccgcccaaacaattttattttactttttaaaaaagatgactaaacattttatttattaagtttatttttttaaatctttaaaattgttttattttcatagatttcggtggtacaagggcaggtttcttacatgcctattgagaggtgaacccagctgggcttctgggttgggtggggacttggagaacttttctgtctagctaaaggattgtaaatgcaccaatcagcactctgtgtctagctaaaggtttgtaaatgcaccagtcagctctctgtgtttagctaattgggtaggggacttggagaacttttctctctagttaaaggattgtaaatgcaccaatcagcagtctgtatctagctaaaggtttgtaaatgcaccagtcagctctctgtgtctagctaattgggtaggggacttggagaacttttctctctagttaaaggattgtaaatgcaccaatcagcagtctgtatctagctaaaggtttgtaaatgcaccagtcagctctctgtgtctagctaattgggtaggggatttggagaacttttctctctagctaaaggattgtaaatgcaccaatcagcactctgtgtctagctaaaggttcgtaaatgcaccaatcagcactctgtcaaaacagaccaatcagctctctgtaaaatggaccaatcagcaaggtgtgggtggggcccaataagggaataaaagcaggcaacccgaacaaccagtggcaactcgctagggtcatctcccacgctgtggaagctttgttcttttgttctttgcaacaaatcttgcagctgcccactctttgggtccacactacctttaagagctgtaacaatgagctgtaacattcactgtgaaggtctgcagcttcactcctgaagcccctgagaccaaggaatgaacaactctggacacaccgcctttatgagctgtagcaatgagctgcaacactcaccacaagggtctgtgccttcattcttaaagtcagcaagaccaagaacccatggaaaggaaccaattccggacacagtatgttgcatggtgatggaatctgggcttttagggaacccatcacccgaatagtgacattgtgctcaagagagaatttttcaagccctcactcccctcccacccttccaacttctgtagtctccaatgtctaccactttattctatatgtctacgtgtactcattgccccaaacaattttaagtcaacagttcatgaagcgtaggtattttatgaaagattcagttatacgatggggaaaaggcttcatatcatatcctacctcataaaattgcttgttcccatcaaagttcctcttcccagcctatttcattccttcctaggggctcaaggaaattatctttattgtgtcaataaattcagctgccactctcagcttgcttatgtatcactcagcaaaaacaaaaactaggtagttagcggagccatctctatcaatgactcctcaagaatggcctcttgccagaaggtgggcatataatggaatgagctttctttttaacttgcaccataagtggcttttcaaagtattcaccaacaaaagagtatattcttacagtaaaattctatcttaagaaaatacattttgcattagggaaatgcttcaggatattggtcttggcaaagatattttgggtaaaacctcaaaagcacaggcaacaaacacaaaaatagacaagtgggattacatcaagatgaaaagcttctgcacagcaaaggaaacagcagagtaaagagataacctacagagtgagagaaactatttgcaaactatccctgtgaaaaagaattaataatcagagtataaaggaactcaaagaacccaatagcaaaataaaaagatgataaaaaatgggcaaaagatctgaatagacatttctcaaaagaagatacaaaattgatcaatggtatatgaaaaaattctcaatattactaatcaccaggaaaatgcaaaacaaacataatgagatagcatttcatcccagttaaaatggtttttatcaaaaaaattaaaaaattacaaatgctgtccaggatgcagagaaggggaacccttgtatgatgttggcaggaatgtaaattagtacagccattatggaaaacaggatagaggtttttcaaaaaactgaaaatggaaatagcatatgatttagcaatcccactgctgggtatatatccctaaaaaagtaaatccattattatggagatatccacactcccatgtttattatagcactattcacaatagccgaaatacagaatcaacctaagtgcccattagtggatgaatgcataaagaaaatgtggtatacatacacaagaaaatagtattcagccataaaaaataatgaaaccctgtcatttacaaccacatgggtggaactggaggtcattatgttatgttaaataaaccaggcataaaaaaccaaatattgcatgttctcactcacaaataggggctaaaaacgtggatctcatggagatagagagtagattgctggttactagaggctaggaaaagtgggaaggtgggtggggtgaagagaggttgaatatggggtacaaacatacagttaaaaggaataaaatctggtctttgatagtatagtagactgactatagttagcaataatttatggtgtatttcaaaatagctagaagaaaagaatgagaatgttcccaacataaagagaagataaatatttgaggtgatggatattccaattaccctgattagatcattatacattgtatgcatgtatacatatcacatgtacccccaaaatatgtacaaatattatgtatcagtaaaaagctgtatgaatatccatgcacctactgtttgttcagcaattaataaatgtctgttaacataacaaaagttttcttttaaaaaatgcagttattataaggatttattttgtagaacaagagcccaacagtcaacattttagagaactcttacaaattataattaatattatgcaagaaacagaaatgggataggataaagctttataaagtacacattaactaaacaggaaaatataaaagtaattaaaatatgatttaacttagatactatgacatgtttatatttgatgcttttcaggtttaaagcacctcctgtccctaattttatctgaactctacaatgatgtcacaaatacacaggtccaatatttttctaaagctctgtgctttgaagtggtgacttctaggctataaaaattgtggccaacttatttcccttgttgttactacggagtattactaggcacctcctctatatatttcttctttatatatcatagctgatagtttcaaccccatccaattccattaaaataataaaaacatacaactttgagtgctgggtttgtgctatttgctttatagacattacttcaaattctcatactgttccaagatagtatatgtacagttgtatagaacattggtccccaacattttgggcactaggaaccagtttcatggaagacaatttttccacggacggggggcagggggagatggtttcaggatgaaactgtttcacctcagatcttcaggcattagattatcataaggagcacgcaacctagatcccttgcatgcacagttcacaataggattcatgctcctatgagaatctaatgctgctgctgatctgacaggaggtggagctcaatggtaatgtgagtgatggtgagtcgctctcttgctagctgctcacatcctgctatgcagccaggttcctaacaggccacagacttggaccagtctgcagcctaggggttggggactcctagtgtagaagattatttaactttaatattaaagattattaacccaaactagaacattggtaaatgctgggaataccattcaaacttagggtttgggctccttgctttctctatcttgtttcctatgagtagaatccagaaccggaatggtttacttcagttttaaaaatattaatagttattgaatgataatggctacttaatttgtgagtcccaggtcaaaatgaaaatgcaaggctctttgttaaattatgaagaattccaagataatgacagcagagcaaaacaccaagtgcagggtccttccagtccctgagtggctgcacagctcactgcccaagaagctcgccctgggatttggcttatgcgacagctgctgtaccaggcactgtggatacacatcaaaataaggtatcttcctcctgcttggggagcttccagtggtggaggctgtggagaaatctctcttttggaattgtctgtagagtcagcatcaacttcttttgaatatcttcagagtggcaaatcttttctctctgaaggataggatttcttgaaatagccaaactcactctgttacaagccttgtcaataacctgagaggacagcctgggtaattagtaatggagcctttggttcaaaccaaagtgtgaccatgaagaaggaaacttgattatcttgtgaggcttttgacctaatgctggatataggtacaataaaaaggctccaaaaatattggcgaccatgaagcattctcagatgggctgactacattgaaagcagtgctgatttggtctctgctagtcagcaatagaaattaaagagtatagtcagcttcaataccttaaagtcatgctttctatgcttggtagattgctactttggtattttcctcaaaaataaaaaattatccttagcactacaaactttgataaccaagctgcactagagatttgtaatagtagaaataaacttgaattcaggaaaaaaggtgaatgcatgaatcttgtgatatgatgaaatgatagagtcggatagcatccttccaagtcatctgggcaaggctttcaagaccatctctccctatcaaggtcatgaggatcaaatgagaacgtgtgttttaatgtaccttgtaaagtggagaatgagagaaatataagaaattacatagcctcttcattttacagagaacgaaactcatctctctgggcttggtcatctgtcttctgactctctttgtttctcaaggtcaagcttttattggttgggtctcgttcaacaaccgtggctgggactcttagttataatgcagctgctatcttctcaccactacagtagcagggccctgtgtaatttctgggtgatgaattagacctgcctagtcccttggcttccccactttcttcccttgagttagaggctagatgacttacatgtatagattgggtctgctatgaacaaggtatgtgctgggaaaatgaaattaagaatggactcagttattcgaaggtttattttcccaaccaggcaagggagaacagtttctctaaataggtaggcttgggtagctgtcaactctaatcactctgtaacacagggtctatctataaatgactagaacctggaatctcatgtcatccagggaatcccaaaacagaaaccatcactccaattacgaggcgttttctctctctctctctctcaacactttggctaaattaggctgtggactgaatgatcaagactgttcctttgttcctttgtttacttcctgtatgttcaatggtgtgtgtgcacctgtttgcatgtgcatgagtgtgtgtgggtttgattttcatagtctaggggaatgtacaattgcttaatcaattgaaataaaactacctcttcaacatcttgttatttatttcattattaactttgggtttatttattattattaagtgttcagaattggaatttctgaggtgaaaatgcaatgtccatggactcaaccttaaaagtaccacatgtgctagaatgcacatatatatggttaaaaatctggtctgcaacaagtcttatcatcagtttacaagcttctccccaaaaacgcttctatttgtaaaatttctcttctatagcttgaaccaatgctttagatatatattttaaaaacaggatttagctcagtacccttccttttaaaatttctcatctttgttatgaaggattcaaataacaccaacttggaaatgttagctttgaggattttatttttaatagaaaacagctagctgaatgatgtcctcttttttctaaataacctgatttctcaggctatcttgagagttttatttctctttgatttcccttaccacttcctatcttatctctccggataatcaaatccccgtaaatgtaaaacccttctcctttgaagctgctgccatttagaacatgacagccttcttatctctcttccctgagctgcttcttcagctcatgccaagtctcaattgaaatgtatcttttcttcttctctgttatgatccaacattcaagttacattgtataatatttagggatatgaaatgtgtgtatatttcatttgaacttgcacattttgctacactgagttaatagcatcactgataaggattttacatcaatcattcagaaatatttacttagttgctgatacgtataaggctgggagctaggtcacatgcaaggatacatgtaatgcatggtcttcggctgctttcaggaaacgtctgcattctagcacaagtaaacttatggctttgagatgctgccccacagaaaggagactacagtggatccttgaacaatatggagattagaggtgtcaatccctacaccgtcaaaaatttgtatagaactttgactcccccaaaacttatctattaatagcctactcttaacttgaagccgattggtaacataaatagttgattaatgtatttcatgttacatgacttattctgttttcttataataaagtaagctagagaaaagaaaatgttattaaaatcacaaagaagagaaaacatatttactatttagtaagtggaaatggatcttataaaagtctttatccttgttgtcttcacattgagtaggctgaggaggaggaagagaaggggttggtgttgctgtctcaggggtggcaaatgagggagagaattcacatgcaagtggatctgcctatttaaaaccagtgttgttcaaaggtcaactgtatttgctacgttgcatgacttgttgtgcagacattgacctgaactttgcttctgttatagcatcttcacccactgtgacatttgctggtagttggttcctctccgtgtactgcccacttccatttatctttggatgttcagcagagtgcattgcacatgcaataactttgtgaatgactgatggaggaaatgcatgtctaagtattcttcaagggccgctttcccctagttctgatctaatactgtttgtgtagagtcctgttaaattctagtgcagcatgatctctgtcagatattaaattcatggttttgtctccattccagaaagaggtgtcaagggtttttctggtctgcctttacgtagaattactttatctcacctatccttccttcttccccaccccaaggtaaacaagcttatgtttcacagtttattctcccttggagaaatcaagctctactgttcatagaccacgatgacctgaactgttttggatgtcatgacccacggggagcagtgtgtggatcttgagaaggatggaggaaagaaaggtgattggagctgcactcctcactggggcaagactgctgaggccatctggttttgaacctggtttgtaacctagggcgtctggagggggacagtgctgcggtagcagcacagcccaatgcccaccctccaggtgatatggggcctcatcccatactgtcttctaggaacggctcccttggcctgtagtttgagcctcagttgtgtctgtgttttgaagaaggtgactgctgatctggccacttcctccatgctgagctgtggtgctgacccctgtgaattgcttctgtttactaagttatagcgtctgctttatcagtatgcttttcatttatttgaagctacttctcaccaatttcatgttccatatgagaccttggggcagggatttaaacctcctattctatggggtgagtgagacataaaggtaaattttgagttggagaaacatgtggtagatagtaattcctattaaaataggaccatctcaactcaacagaacaaaaatacagacttatttcctgcagcaaaataaacccacatgtgaagatgtaatctgctcaggcccccagatgctcctaacaaagggagcattagcctttagtgtccagattgccagtgtccattctgtaaatcttttctcctctatatttactcttcagcacctccatattttccttatttcttattccttttattgtcacatttgctcacaagaaagggtgtaatgtttgttgctgtctgttgatggaggaaacttcaaactgaagcatctcttctaggggtgcctgtcttttaataagcacaggattggtaaaccaaaaaactagaactcaacaaatgaattaaagtgttgaccagaaaggcctaagacattagagtcaacagacattcttggttcttctgaaatctgaagtgtgaggacttatccgccccaccttaatggtttggaacatcactggtgacagccatcttgtttaaagcttttatttgtatcaaagtatatttcacaggagtttatggtaagtatcacccatgattccaacctccaaactaaagaatgggacttgaagtgaatctttctggaaatggcagttataaatctcccccctcctctttgtcagcatgcccagtggtgggaactgaagcctgagaggttcccaacatttcaacctgatgtttatgtttgaacccatcttgacgtcatgaaaatccacacttcttttggttaggagggactgagcagccttgctgctggcttatacttgagtcttctcatattagggacattcagtggtacaaggagaggaaagcagggaaaattgggaggagaaatccctaacctaatgtcttcatcaaccccttttgctcactgggaccagccaccataaaaagtctgttcctttctgctttgtggaatgtctccaggatggtcaaggggaacctgtttattccatccattttgtctgtgttcacagacttggctgaggatttagttcttgctgttcatagccgtcccagttggacctgaagcttccaagagtgcctttatgaatgaagaattcaattacccacataccccagccccagcaaccagaccctcagcctggatagaaacctggatcgccacttaatgcaaacagagaggtcaggaagcagagtagggtagttgtattagtttttttttttcttcatagcatacaaatttaacagcttaaaacaaaagaaacctaatatctcatagtctccatatgtaatattctgggcttgggttaacttgatcctttgctcagggtctcaattgacttaaatcaaggtgttttctggggctgcaatattattttagtgtctcatctgagggccctcttccaggctcactagtagtccaaagaattcaattccttgtggctgtaggagtcaaggctgcttgctccttcaagaccagtagctgaatctctctgacttccgtgaagaactcagcctttctttcaaagggctcacttaattgggttaggtccacccatgataatctcccttgtggttaactttgcaaaatttcttttgtcttataatgtaacataatcacagagtgacgttccatcttattaacaaatcctgctcatactcatggaaagggcttatagaagatgtgcacatcagggaatgatggcaatcttaggggccatcttagaattctgcctaccaaaataacgaaaatagcatgatcctgggagacagaccgtgctgggtttcattcctgttcttggcttttactgtcttatcaggtaatattgggatctgatacttcatctgtcaaatgaggctgataatggctactgtgcagtcttactatacagatttaaggtaatgtgtataaagatctagcatgctgccagccacacggtgagccctccgtagtagtgatactatgataagaggagaagatgccagacttggctaaggagggagaggtggggtatgtgcagctgcagtaatgctgatatgttatgggcctaattattgctgaaaaacttttgaaggattttgaaatattgaggaacatctgcaagtccatgtaaagagtggggatatgtcaagtgataactgggtagtttcacatttatttttatgtttccaattagttcagcctcaactacaaaattcaaacaaagaagatgtaaaaatctggcccagaccatgcatctgattataggggtaggtagaatgaaagtgatttctttacttttataaataagtttgatttttctatttataaaagtaatatatgcaaattatagaattcagggaccacatgtaaatataaagaagacaaccactattaacatttggtttatttctttccagtgttttcttcttgcacagctcatgtcatattattggtacctttctatacctataattacagatcattcttaatcatcttaacattagatcatagacagatttctctgtttttggacaatttttaaattaaaaccatcattttaaatgtctgcacccttcagaggttgcagttttatgttagcctgtgtgattatttgattaatgtctttcttcctcaattggaatataaattccataaggaaaagaaccaggtctcttttgcattattgttgtatccccagcagctaatagtgcctggcacacgataggtaaacaataaatatttgttgaaaggctgaaagaataaataaatggctacatcttgtggatgtgctataatttactttctgctctcttgtttttaacattttttcattactataaatgaaactgcagtgggcattgcacataaatcattttccatgtgtaaattggttgcttctctcctcagtttagagtgcaaattgcatgctgcagttcccaaaatgcaatttatgagtatccacacatgaataccggcagaaaatacagaggactggtctgttcttgtacaagtgaccaacctctcttcctacaggggttaaaaaataggtaagtgtgtgtacttttttcgatgacaggagcccagtctcattggattcctttgggttatggattataacagagaacatactggctgttgattaataattgaatttgacaagtaagacccgaaatgggtaaaggtcgaaattgtcccctgctttccttctgacctctgtccttgggtggcatttgatctagcaaaaaagatgcttttataatgagactacagtaggcaaaattctgaaaatggaccccaagattttatactttaatatccaaaacccatgcagataatgagctagtactcccatgattatgtcaggttagatatcacagttgactttaggataagatgattatctgggtgggccagatctaaccaagtgaactcctttgaaagcagagagtttttctccagctaatggcagaagaagtcagagagatttgaagcacaaggggaatttgatgtgctgctgcaggcttggagatgtgaagatggagggactgtgtgagaaggaatgcagtggcatgcaggggctgagagaggcctctggctgacaaccaatgaggaaatggagatctcagtcttacaactgtgaggaactgaattctgccaacacgctgaatgagcttggaagcagtttctctccacaatgtctagatgagggtccagcctggccagcaacttgctttaaacctcgtgatagcctgagcaagagaatatagtcatgctgatgtctgacctatagaactgtaagctggtgaatggatgttgttttaagctgctcagtttgtggcgatttgctccacagcaatagaaaactatcacaagtacctaccctaatgttaaatccagtgaagcaggctctcagttgtgtaaactcttatagctactagttctatatcaaaattatccaggaatctggcttctaggtcttaattcttagagctttacaatataacttaccattttacaggaaaaaattcctgattgctattttcttgaggtatctccaattactaactatgaagacttttagctactacagtctcctgcaatgcccagagaggacgcattcaaaatcagaagaaagtatttgaaaccaggccttggaattacttctttaaaaatggaacattgaagtggttatgcaacccaccggcagataacaattataaaaactgtataaaataaaacaggaaatgctggaaagcacccaaaagcagagagaagctaagggagaatttgacccccaaaaaagaaaaacaaacaaacaaacaaaaccaaagctgtacaacctgaagaacaggaagagacaagaattttgagttcagggcttccttggctgatggcattgctcacggctacggctctttcctctaccgtcttagaagctaatatgcttaaagactaaaggaatgaagctgaaaattgtaaagaggaatcatgaaggatatgaaccacaaaaaaagaagaaattagagcattaactgcccagatctgtggctgacaactaactaaacatgccctgagggagcctttcaggaagcatggcagaaaaggagtcagagaccagagataaatctgctcttgaaagataaagctatggagagccagatctgtgaatttcatgcttttcttaatttaatacgtctcccagctgctcacagcttgggaggcagaaatactaaagggtcagagaacagagcccaaggctagaaatttgggcaattcttagaagcaaggaaactacagagggatgaactctatttctacccaaatccttggctgacagccaaatttgataggcacaggagagaactaggaggttcagaatgaaaaatcagcaataagaggacataagaataagaaataagagctgtataccaagggaaaggaaatattggtggttatattccaggcaacttatgctgcctaatagaacagaaatctaacaatttttattaacacatggcagaatccaagttgctatcctgtattatctgtgatgtctacttttcaaccaaaactactagatgtgtcctattgctgtacaacaaattacttcaaaacttagcagtttaaacaacaacaaacacctatttttaaaaatcacatttattttctgagaatcagtatcttaaagaggcttagctgtgtagttctagctcagagtctcataacattgccatcaaaatgtttactggggctgcagtcatctgaaggcatgactggtgctgcaaaaaccacttccaaactcagttatatggttgttggcatgcatgcattctccagtttcatttaatctccagtttcctccaatggtggtaggcttggacaataaagggcaagttctgtacaaagcccagacatggaatatgcaagatcagagcctaagttagttgtgaacatcagggtgcctctgtttacttctttataacactttaaattgtgtgttttaatggagatgaaattaatataatatgggaataaaattagattactataatacaaaaatacacatatatgtatgtatatttatatgtatgtgtgtgtaacattagttgggattatggaatgttataatgttaagggttttaaggattattaaaaaatttaattaatattggccaggcacggaggctcacgcctgtaatcccagcactttgggaggccgaggcgggtggattacctgagatcaggagtttgagactagcctgaccaacatggggaaatcctgtctctactaaaaatacaaaaaatttagctgggcgtggtggtgggtgcctgtaatcccagctactcgggaggctgtagcagtagaatagcttgaacccgggaagcggaggttgcagtgagctgagattgcgccactgcactccagcctgggtgacaaagcgagactctgtctcaaaaaaaatgataatgataataataataatttaatatattgccaacatttaatttagaaaatcagtttgtgagtcatatagtttaattttgtaatttgaattcccatagttctggcacttaaatttcttgagtctgaggttatgatctctgagtttacctcagagatcaagttcttaagaaactacccccaatatatttagaggagaagaaggcctctgctatttactgtatgcatgtatataactttgccgagtcctggtttccacctctgtaatattagaataatagtatccacttataaaattgatagggagttttagtgagatatcatgggaaatagctgtgcatgtggaacatgccagactgtacaaggaaaaggttcaattaaggctagtcttgtttctcagcctccatatccttctcacggtatttgcttctcagtataatttttcttgtttctctatgttgcacagtaatatgaaatgttttaggaccatatctgatcctattattccacatctatctcaattatgcattcttgaggttacccagaacccctctcttaggaaatggtggcattaatgggatattaaataaagtatgaaatatttattcagtgggggtatttaaagcaatttccaacagaagcagaatgaatgtttattaattaacttctaaaaatagtggcttttccatgtggtaccgctagttctcattactgcattcttggtattgcatacctaatccctgaaaatattgatgcgatcggacttaactgtcttttcttatttctcatcaccaatgacattaggtttgattacaatcaggccggattgtccactcccaacccctgcggagatcgcttccattctgtgtcacttcttaatttcctaaatcacattgtctctcgtttccttacgtgagtgaggcacaggccactagaagcttaggaaacatgtatttttttcataaaaagaccattcattttttccctttggacaatgcttttttcttcctctagcctttctcatttgcatacacatgcaaccaccaaggtatgcacagagagtctctgtcctctgatctccccccaaaaaaacgtatgagaagaaaacacagggcaagtgccatgaacaaatttgaaatttagcaagaaagacaagaaatgaagcagttggttcccaatagcccttccctaccttgataatgtgaacgtgaataaaagaaataaacatgctattagaaaatggatatgccctccctgttacccagagtcctaaagaaatgaaaactcaactttgaggctgagtttagattatcttcaagcttgtcttcctcttgtttcctttttcctttgcatctttgagaaggagtgatttgtggttgtaaatagttgtcataacatcagaatggctctgacaaatttgtcttcaaaataggatccctcttcacctccccacctggactgacagttaagcctcaagttgccccttgtatcctgacacctcagctcaagacaactcatttcctggagggaatacaaccagaagatattgattctgcctggggcaggccagctggccccatgatccagggtgtcaacaaaatgacatttacccaggggactttgccagagctcataatctaacttccagccatgcaggcttagagagtagcttttgtctccacactaggagtgggtggaatcacaatagccaacctgtagaaaatgatggatgagctgcaaatggaaaacgttcatgggtaaaagggaaacttaattaaaagggaaagtgttgaatttcaaggatgaagaaagaattataaaagcatcacagcattaaaacaataataacaatcaaccagccaacaataaaaacaaatatctaagaaggaaaataaaaatctggacggccctcagacttctttgcaatgttagatgccagaagataatgaagcaatgattacagtaacgaagcaatgattacaacagcatgatggaaaaggttatgcctccaccttctatctttagccaaactgtcattcatctgaaaacaacaaaaaagaatgcatgaatatgaaaggactcagaaataaagcacttaggcatgtttcttaaaaacaaaaattttttttaatatttttttaagaaggaagaaaataaatcaactattcaaaataaataaaaaagaacagcaaatcaaatattaggttgtggtgaaagtaacttttgcaccagcctaatacatagagatagaaggaaagaattaatacagattaaagcccagttttataaattagaaaacaaaaaagaatacaatttatatttaattgcaagagtgtattttgtgagaaaatagataaaatattaagtgattcgaagagctaaaaatgcaaaattgacaatgcaataaacatattacatcaattatatgaaaatactttgtacaattctaggctaattatcttcaaagtatcatttgaatatatatatatatattttgtcagattactaaaattggtagaaataagatagaagatatcactatataaatatcttttaaaaaatcaaaatcttgtctgaagaattagctccaagaaaggtgttagtttagatggtttcctaactgttttgtggtccttcaggggatagataaaggatgttgattatctaactttacagagcacaggaaaggaagtcctttgcaataattctaattatttttatatgggtagtgtaagtctggtagcccaaacttgaaaaagttggcatacaataaaaaacagatatctgactaattttttatttatatatgaagtaaagatctttaataatatattagaaaatcaaatccaggagtatattcaatgaataattcaccatgactaagtgggatttattccagcaaagaagggatggcacaacattgagaaatctattaatataattcatgatattaagaggttaaagaggaaaacattatttcacagttgtcaaatatgtatttgataaaatttaagattatgctttaaaaaacaagatctcagttccttggaattagatatatcattcctcaacacaaggggcatggtgggggatccatctccagccaacgtcagttcctggctcgccaaagatacactggattagatgaggtcagatgaaataaaacaataatacctactgtcatccctactatgtaagatgattttggaagtattagtttataaaagtagagattgaaaaataacaaacaaaagagacatgataattggaaaagaagaagtaagtttattatttacaggagatataatgagtaactgtctgggaaacctaacacaatcacctgaaatcagctattggaaaacctaagggaagttcaaaaacgtttcaatgattgttttactgtatagcaataatcattaactagagaataaattggaaaacaaacctcatttagagtagtacccaaaagaaggaattactgggaaaaagcttaccacatcctaaagccatagtgtgattccactatgtggttgggttcagctttggtaaaggacagactggttacaacttcagatcttccttttattagtagtgtggccagttaactaacccaaacttgcattctcctctgtaaaaccaagagaataatgtctcacgagagttttatgaagatcaaatgagaaaatgtacccaaaattctcaatgaaatgctagcacataagattattattgagaaaatcccaaaactctcctggcacttggtaactaaattgatctcaagaaaagctgattatctgcacaaatgtgtatgcataaagaatatgtacaagtatgacctctgtgggttttttgtacagaaaaattagaaacaattatatgtcaacataggtgattgacggaatacattttatacatctaaaacgtgtgatatttgtgttgatttaaaaatacaatatggcagtatatttattgaccagtaaagattgtcataatacatccagtgaaaagatgagcaaaaatagaatttatagtcctattttggtaaaaattctgtatataatcatatgtatttaactgaaaaataaaaaggactaagatatatgctaaaatattagtaatgatttgctatggcttatcagatttctttccactgatgttttgtttagaaaattggggttttctaacaattctgtaacaaatattaatttcttacattaacaaaaaaagtaagaaacaggttgcttgaggtcctctcttgcacactgaaatcacttgtcaaatcctagaggccaagaccccctctctcctgatagagtttaggtggacagagcttaggttgtccacacttatctctcagtctttttttttcttccaatctatgttctctgttggatgaaaccctaccaccatatgactgacatgtttctttatatatgtcaatatctttggtcaagaattgctttgacttgggaaccgctctgtctgtgatgtgatttgtacacctaagctctcaccattcattcaacaaatgttgacccagcatccagacatttggctaggtactcaatatgaggtgtttgctggggggcctagggagaccaatagagagcacggctctttcctgagtaggttctgaaccaacggagaagacaaaagagagggcagatggagaaacaaaacgtgtgtgttagtttcttacatgaggagcagctcagctaagggaagttggggtctgaagagcgatcttgctctcctatgtcatcgtcattgcctctcacgtcccagtggagtgggaaaggggatccacatctcctgcgcaagagtgtggctctggtagtgcctcttgcttgagaatcatggataaaatgctctctctggataaccttttctgcctctcctaaagaagattgaggaaaccgagtggaaaaaaattaggaggatgatgctaaaactcttttctccctgtgaaaggaaaaggccagggctacggatgtcctctgtgtggatgtgactgcagtctcaaaggaaatctgctcctagattcaaagacattcccccactcctaattactgcacttttcaatatcttttgggacgcctgtgggcagcactgattttacccctggatgatgctgaaatgggggagaagagtatattaattaaattaaatttgaggctactcaataaggtttggctgtgtccctaccaaaatcgcatcttgaattgtagctccataattcccatgtgtcatgggagagatcccatgggaggtaattgaatcatgggggtgaatttttcttgtgcttttcttacgatagtgaatgtctcatgagaactgatggttttataaaggggagttcccctgcacatgctctcttgcttgccaccatgtaagatgcacctttgctcctcctttgtcttctgccatgatggtgaggcctccctagccatgtggaactgtgagtccattaaacctgttttctttgtaaattactcagtctcaggtatgtctttattagcagcatgagaactgactaatacactactctatcccaaaagctgaaaattcattcttagtggcacttacctttccaaattatgtctagccatgttttccaatatagcccaccagagataatacaataaaattaaatgacaacattgagatattctcaataataaaatgtcaaaaacatggagatacatcaaattgagtataaacatcctcttattatcaaattcctgaggagaagttagtccaaaaattacactgttttgcaagttcaggtgcaaaagaattagtcagaaattaaatttgcttgctcttgtgaattaaaggcctaatggaatcaaagttctctcccgtttcttattttgttcatttttagccaaaggtggtcttttaggtggaactgaggttctttcagtagctttctttgggagtgataatgatctcttcaggacctcagaagatgaattactctaatgccaatctccaatgagcttcacctttaagacttcaaatgtattagggcattaatgtttcctagtattgacccccatccccaccacatttagaaagcaagccaatccccagccctgacagcaattgtttcaggcaaagctttgttttcagaacacagtgctggatgctgcctgagtccaggtggggacccagtgattactaaggagggcgaccagaagtgccagtttccttgggacagtcccattgtatgcatcttctcccaaagtaatgattgatagcagccatttttactctcaaaattgcgctgtttggaaaacaaattttatggtcattctacgatgaaagaaatctagatttcagctttgtcaggaaggcactcacttactccggtttttttggagtctaccacctgtggattaagctcaattggaagaaaatcttcaagtaggaggttaatttgggtaatatggtcctatcatatcctagggtaggggggaatctagctacttatactgtgtcctctcccagagagtgaatttgatacactgtttccttctcattaggtttagaaatttgtggtggtggtaaatccaatcactgggtcttacttgaggttcctttctttcccttcaaatattattttcacttgtaaatattctttccccgttgccctgagtacaagcatttagtattaacagtataaatttaggcattacctttgtaatgtctgtaaagcagaacatgacttatttgcattttaagagcagcaaatattgttggctcataatgtctatctgcatgacctgtactgggaaagattattctccattgctgacttttttgttttgttttgcagggtcgataagatttattttgttttaattttaatttcaatagtttttgggggaacaggtggtgttttgttacacggataagttctttagtggtgatttcttggattttggtgcaactgtcacctgagcattgtacactgactttaatgtgtagtcttttatccctcattggcctccgacacttccccccaagtccccagagtccattatatcattcttatgctttgcatcctcatagcttagctcccacttataagtgagaacatacaatgtttggttttccattcctgagtgacttcacttagaataatagtctacaactccatccaggttgctatgaatgccattatttcattcctttttatggctgagtagtattccttggtgtatgtgtgtgcatgtatatatatatatatatatacatatgtatataaaataaaatataaaaatatatatatatctcatttttttctttttttttccttcaacttttatttaagatttggggtatatgtgcaggatgtgcaggtttgttacataagtaaatgtgtgcgtttgctgcacagatctatccatcacctaggaattaagcccagcattcattatctattcttcctggtgctctccctccctccgtacccctcaatgggccccagtgtgtgttgttcccctccctgtgtccatgtgttctcattgttcagcttgtgtttaaaaaagataacatgtggtgtttggttgtctgttcctgtactaatctgctgaggataacgacttccagctccatccatgtccctgcaaaggaaataatctcatttttttgtttttttgttttttgttgttgtttgttgttgttgttgttgttttttttcatggcagcacagtatcccttggtgtatatgtaccatattttctttatccagtttatcactggtgggcattttgcttgattccatttctttgctgttgtgaatagtgctgcaacaaacatatgcatgcgtgtatctttataatagaatgtttgatattcctttgggtatatactcagtaatgggattgctgggtcaaatggtatttctgcctctaggtctttgacgaattgcaacactatcttccgtaatggttgaactaatttacattcccatcaacagggtagtaaaagtgttcgtatttctccacaacctcgccagcatcagttgttttttgactttttaataatcaccattctgactggcatgagatggtatggtatgttattgtggttttgatttgcatttctctaatgatcagtgatgttgagctttctttcatatgtttgttggctgcatgttatgtcttcttttgagaagtgtctgttcatgtcctttgcccactttgtaatggggtcgtttctttctttcttgtaagtttgtttaagttttttgtttcttgtaaatttgcttttgactctggatattagaccttaatcaaatggatagattgcaaaatttttttcccattctgtaggttgtctgttcactgtgatgacagtttcttttgctgtgcagaagctctttagttttattagatcccgtttgtcgatttttgcttttgttgctattgcttttggcattttcgtcatgaaatgtttgcctgtgcctatgtcctgaatgatattgcctagattttcttctggggtttttatagttttgggttttacatgtaagtctttaatccatcttgaattaatttttgtgtaaggtgtaaggaagtggtccagttttcattgttctgcatacggctagccagttcaccatttattaaataaggaatcatttccccattgcttgtttttgtcatttttgtggaagatcagatggtggtaggtgtgcagtcttatttctgtgttctctcttctgttctgttggtctatataccacattttctttatccactcattggttgataggcatttagcctggtttcatatttttggaattacgaattgtgctgctataaatagacgtgtgcaagtgtctttttcttttcttttcttctttacttttcctttcttttctcctcctctcctctcctctcctctttcttttctttgacagagtttcactcttcttgcccaggctggagtgcaatggcgcatcttgactcactgcagctgctgcctcccaggttcaagtgattctcctgactcagcctcgtgagtagctgggattacaggcatgtgccaccacgcctggctatttttttttgtatttttagtagtgacggggtttctccatgttggtcagtttggtctccaactccctacctcaggtgatccacctgcctcggcctcccaaagtgctggaattacaggtgtgagccaccgtgcccagccacaagtgtctttctcatacaatgacttcctctgtgtagatacccagtagtaggattgctggattaaatggtagttctgcctttagatctttgaggaagctccatactgttttccacagtggttgtactagtttacattctcaccagcagtgtaaaagtgttcccttttcaccatgtccatacaaacatctattatttcttgatttttaaattatggccatctttgcaggagtaaggaggtaattagtgatgttgagcatttgtccatatgtttgttggccatttgtatatcttcttttgagaactgtctcttcatgtccttagcccactttttttatggaattgtttgttgtttccttgctgatttgtttgagttccttgtacattctggatattagtcctttgttgggcgcatagtttgtgagtacttttttcccagtctgtgggttgtctgtttactctgctgattttttcttttgctgtgcagaagctttttattttaattaagtcccatctatttatctttgtttttgttgcatttgccttggggtttttggtcatgaactctttgcctaagtcaatgtctagaagagtttctccaatgttatcttctagaatttatatggtttcacatgtccttcaatagctcagttggtagagtggagaactataggtgtgtggagctaatttgtatggtttcaggtcttaaatttaaatctcagatccacgttgagttaaattttgtacaagatgagagttgaggatccagtttcattcttctatatgtgacttgccaattatttcagcaccatttgttgaatagggtgtcctttgcccactttatgtttttgtttgctttgttgaagatcagttggctgtaagtatttggcttaatttctgggttttttactctgttccattattttacatgcccacatttataaaagtaccacgctgttttggtacctttgaccttatagtatagtttgaagtcaggtaatgagatgcctccaggtttgttctttttgcttactcttgctttggctatgcgggctcttttttggtttcatatgactattagtattgtttttttctagttctgtgaaaaatgatgatgatgttttgatgggaattgcactgaatttatagattgcttttggcagtgtgaatgaaaatatcttgggccccccatatcactaagctaaaaggaaaactcaagttgaaaactgtgcagggtaaaacctgcctctccattctattcgaagttgtctctctgcttactgagatagatgcatgttctaattacctcctttggaaaggcttatcagaaactcaaaagaatgcaaccagttttctctcacctgcttgtgacctggaagtcccctaactgcttcgagttgtccccacctttctgggtggaaccaacatccttcttacatgtattgattgatgtctcatgtctatctaaaatgtataaaaccaagctgggccctgaccaccttgggcacatgttatcaggacttcctgaggctgtgtgtcacaggcatgtgtcctcaaccttggcaaaataaactttctaaattaactgagacctgtctcagattttctgggtttacagcagtatggtcattttcacagtattgattctacccatccacgaatatgggatgtgtttccatttgtttgtgttgtctatgatttctttcagcaggtttgtagttttccttgtaaaggtcttttacctcctggttaggtatattcctaagtattttatttttttgcagctattgtaaaagaggttgagttcttgatttggttctcagcttggtcactgctggtgtatagtagtgctactgattttgtatcctgaaactttaccagattcatttatcagttctagtagctgtttggatgagtctttagggttttctaggtatacaatcatatcacttgcaaacagctacagtttgacttcctcttttctgatttgaatgccctttatttctttctcttgtctgtttggtcttgctaggactttcaataccacattgaatagaagtggtgaaagtagaatccttgtcttgttccagttctcagggggaatgctttcaacctttcctcattcagcataatggtgactgtgggtttgtcatagatggcttttattaccttgaggtacgtcccttctatgccaaatttgctgagggttttcatcataaagggatacagaattttgccaaatgttttttctgcatctactgagatgatcacacaaattttttaaattatgtttacatgatgtattacatttattgacttgcatatgttaaaccatttccgtatccctcacatgaaacctacttgatcatggtgtattatctttatgatatgctgctgaatttggttagctagtattttgttgaggatttttgcatctatgttcatcagggatattggtctgtagttttcctttttttgttatgtcctttcctggttttggtattagggtaatactggtttcatagagtgatttgggaagaactccctctttctctagcttctggaatagcttcagtaggattactaccaattcttctttgaatgtctgatagaattcagctgtgaatccatctggtccttttttttcttggcaatttttaaattactgtttcactctcgttacttattattattatattttgcatttctctaagtctgtctttcatttccagaagttgtaattgtcttttcttttctttttttttttttgagacggagtttcgctctgtcgcccaggctggagtgcagtggcgcgatctcgactcactgcaacctccgcctcccgggttcacgccattctcctgcctcagcctcccgtgtagctgggactacaggcgcgtgccaccacgcccggctaatttttttttttttgtatttttagtacagatggggtttcaccgtgttagccaggatggtcttgatctcctgacctcgtgatccacccgtctcggcctcccaaagtgctgggattacaggcgtgagccaccacgcccggccgtcttttctttataatatctgtttctctggagactttttcatacataccctgtattgttgcttttttaaaaatttctttatgtttgttttcacctctctcaggtacctccttgagtagcttaataatcaaccttctgaattctttatctgacaaatcagagatttcttcttggtttgaatccattgctggagagctagttgatcttttgcaggtgttatagaaccttgttttgtcatattaccagaattacttttctggttccttatcatttggttagactgtttcagtggtaagatctggaactcaaaggctgctgtccagattcttttgtcccatgaggtgatgccttgatgtggtgctctctcctttcccctagagatggggtttcctaagagctgaactgcagtgatcgttattgcccttctgggtgtaaccacccagtggggctatcaggccctgggctggtgctggaggatgtctgcaaagtgtcctgttatgtgatctgtcttcaggtccccgagctatggatattagcacctgctccagtggaggtggcagaggagtgaagtggactctgtgggagtccttggttgtagttttgtttagtgcactggttttcttgaatgctgattattctagcagtgaagttgtcacatggacaagattcaggacctctggttagccaggatgttgcggatggtggaattagctgtttgttttctccttatttggagcagggtttttctgttattagttgctgtaatggcttgacttggttggcctccagccaggaggtggcactttcaagagaataccagctgtagtcgtagaagggggatataagcttaccctatgttggccaggataagtacccaggtttctcaggcgatgataggtggagccatagagctcccaagagtttatgtattttgtctttggctaccggggcaggtagacaaaaaccatgaggttggggcagggttaagcgtgtctgagctcagactctccttgggtggggcttgctgcagccactatggaggatgatggggtggttctcaggccaagggagtgttgttcccagggggattatggctacctctgctgcatcatataggttgtcagggaagtgagggagagctggcagtgacaggtctcacttggctcccacacagtcagcaaggctggtctcactcctgccatgccccaccaacagcaccaagttaataaccaggcagctggtgaacagggctgagatcttgccccaggctgtaagccttcccactcagaaagcaagccgggttcacaggccttgcccttccccacctgcccacatcattggcaggggcttctgtgttcatatctgaacttctcattcatccctccagattctgctcaggaaaattagtgctcagtctaaattattacaaagttcatctaggagcttccttcactctgtggcccatccccaattctgactaccttcccttccccaagaacccctgtgagagaaagccaggaatggcttccctgggatggagctggggactgggagtgcctacagggttcttcctgctgattcttctacttttatattttgcttgactccctaaatccacttcagctctagataagcttaatccttctcctgtgatctggagtttcaggtccccaatggagatatgtgctcagaggcagacttttcccccatctcacacttcaggaactcagtttttcagttgtcttgtggagtttgcagcagcaagctgcttctttcaaagggtctgtgaattcttttggcttttctaatatgttctcatggtggttcttggagcaaaagttcacaatgtaagtttccgaacactgttctgtccatccaagtgggagctgcatgttagtcctgtctcctatctgccattttacttgatccattgctgactttttgttgtacatgtgactgtgtaggaaaatttgggccagtgtagctcaggaaaagctgtagcagctacaccctgagctcatggaacttgctaaaggtctagcactcagccatattttgctagacccacaaggccagcgtctgtggagattgtcttttgagtcactgcttggataagcacctctctaccctcacctgcctggtttaaagtcttgcttttatagctatgcctttcccaaaacagttctcatctgtggaccaacccaccttaagcttcagacacccagtaaggtggaaaggccaaggtccctggctcccagctccagcagaggtgacacagtaagaagtcaaatgcttaatggtgtgctggtaaatacttaaaaaccagctctctatggtagggacaggaacgggagtccccaaacctgatttatagtgtttgccaatttctgtggttgattttagttcatgctttttgtgtcctgtctgataaatttttgcctaatccaaggtaacaaatacttctatattttattctaattttttttttttagttttcaatgttcagttattccagcaccatttgttaaaaagaatatcttttctccattgacctgctgtttacttttatcaaaaaccaatcacccatatatgcatgggccgacttctgtgaatgctattttgttacattgatctctatgtctaccttcatgccaacaccacactcatgattactgtagctatatagtaaacatttgaaaccaactagtaagaattctccaaatttgcttttttatgtccaaattgtttagacacttgtaggtcttttgtttttctacattattttataatctacgtgtgttcattcctttttctgctcatttctcaacatcccaggaatttggagttgaaactcatcttctcctaaaatgccagacaaggcctggtcttgtgatttgttgcctggaggagagtaattgtgaactcccaactaacgttgggagcagtatcccaagaaagagagagaggaagggctggttttaagtcatgtggacttctagatcaatttctagagttaggtagatttacacaatgcactggatcaggcaggccttcctccacttccagaggacagaggaattcatcttgttccaaagagacagagagaggaagggcctcagttctgcatgctcttttaccatcttccctcaaactcactaaccacttgtctcctgagggggtgaggaatgggtgagaacaagaaagtataataatgtcactgccatgacatggaagagcatgtcaggagtggggaagctgcattctctccaccagcactgactctacccattagcattgagtggtcagccttatttcccatttccatgtgcacagggaaacctagctaggtactgtcactcacctagctaggttcccccgagcacatggaaatgggaaataaggctgctctgtagaaaattttatgtgatctagattcagctgacttcataagtcaatgccacagaaaaggagttgcataattttttaaggagtctttttttttttaaataaagcctagctataaaatggcaataaaatgtcaggattaattttttgaacatatacaccaacttctatttctgaaagagtagtcatggtgggttcatcctcttatcccaaataagttttgtttcttgaagcacatcttttccctgagaatatctcccccagttatttctggcctctggtgggtgcctgacatgtctctgctccagctccattggtgctttaccatttctctgtgaagatgccaaacctgggtgaagggctctgtccttgggtgccccacagctgatcttcctggtacaggattccccatagcatagggacagtgtctaccttgaactttttcttcttgggccccgaggcaacctttctcttatggggttcccaaagattttgtttgtttaagtcagctctttcaatttcagagttacctctgttttacacaagctctccacacacttttctcttctctcaatacaactcagctctcctcaacaaaatccctaattgtcatggacaggttctctccaaatagagcctgcaggttcaccggcacattagtttctaaaaatactttctctttatgcttggatgagacactctgctataatttcccatcttttcctactctcaaaatagaaaacaactaatgaactataaatgtgttgatttgttgacaatttatttttctatggcagtgtactctcactaagcatggtacctcaacaagacatttgcattttatgcctcatcgcaaattgaaataaaagatcgtttcttgttcttatgtctttaagtggcctatgggtacagctgtctgccaaaaaaccctggaaaaggctcattctctgctgatgtaggttttggcttcaacttctttctgcaacatgagaaattttgggggcctcagacataggaaagaaaaagaattaatatttgggagatatttactggagattgagaaattacagcctattatttagtgcttaccaagtgccaggcactgagttaagtgctttataatcaatttctcctttcctgcttcattttttcttcatagaacctatcgctctctcaagttatactacatatatttatgtatttattcattcttttttttgttgtctgtcttcccctacaagagtataagctccatgaggacagggattgttgtctttttaattatctgctatattcctagttcctagctcaagggagtcgctcgagatatttgttgcattagtaaatctcttatcccctacagcaagctgtatgattattttcatgtatgagaaaataagggcttaaacaggttttgtaacttttccaaggccgtcaatttggtaagtggtagaaccaagaatcaaagccaggattcaactcatgagtccatagttgtaccatttatctaaattacctcccatctctttcaatcctgacagcaatacgctctaaagtagataccactcttattttaatgagaaaatggaagcccagagaggtcaagtaaactggttcaggtcacacagctgctacatagataacagaagtcccaaactcatattttttgactccaaagtccatgtacttttctatataccatagtgtattggttgagaggcattaaaaattacttggattatgtatttcaggctcaagttatgatgatgttgagagtaacaaacattcatatatggcagaaaacacaggcaaaacatagtttaaatcaaatatgtgaggtcctcatgtttcatgactcagaatctggattttctggggttcacctcttgccgtgtggtgtctcaggtaataaggagcctgtaagccctccttgcctgctcactgccccttgcagcagaaatatatcctcccatcccactacagttagtgccaccaaagacagatttgtttgctgtctatttaccacattgacaaatcattgatcagagtccagctgggaagactgtacactaaccagacagagccacgagggtgccttaaaaatgatgagggaagtcactggaagccctattagtacccagaaggtactaaggatgagtgctctgtattctggctttgtactctcctaagcatggaagataaatatcaagtgctgctaaaatccacttgtccagattccagcagacacaagctctttagggaatatggtgcttgagaagttaataatatttagaaatccctgggcctgtcagaataatgaatgcagctaataaacattctaattagttaacctggagaaaaatctttgccactgtagagtggacattttcatatgatcctgaatgtaaacattaccttatcatagacggctgtttaaatgttactctatatcttttcttgggtttagacactgttattgactatgcaaaaagcagcaaaaaagagcttaataaaaagtgacagcaggcagctctccctgccggcagagattaagtgcttagctcttggcatttcaattacctaaaactaatggaataaatattttacaatattattgccttttggggggtaaagcactcaaaggaaaaaatatacatgaaatgggattctgttcttttcttaatgaaataattgaaaatggatttagtatctgagtgtgatcattgcaaaaataaagatgctagaatagtatcagtgtgaagagatcaggacataatttcttgtacacttggccttcactgctgtcattttgcctctagcataattttaaaataatgtcctctaactatatccataaaaccattttagctgagctcagatgattttacgatggcataaatttattagggtaatttttttttaaagatgaagctagtcaagaatttccattcctagagaatattgtattctggacatcacggggttggggtgttattaagtttactttttgaattggctctcagggatgcaaggaaacacaggcaagcaacggctgcctggagaatgtgttttttcaatgaaatgatacttctctattcctagtacagaggcttccatgcaaagataataatggcttttgtccatttatagaaaatagtaggacccaaagataaattaaatactgctaatttcagtgtgtgaggtctttggatattgggaaatggtctattttccctttaggtacgtcatcattttcactaaagttaataaaaatatcaaacatgaatctgcaaatggcttgcatactctataatgttacattatgtctgatggggcccattagtttatagtgattgtttatagaattttcaatgctgtgtgtatttgtttgtgtaagtagagaagttttataatgaaactaaaaattcaaaaatatccattatgttttaaaagatcttattccctgctcaaatgatttgccctatgcacatgatattctcaagagacatccctttagagacatgaattttacatgtcttttataattgttatatcggtgataatagcagataatttattcagtgaaatgcatctatatatgtggcaaaatactcatcacttcaaaagaaggcatttgctattttatctgtttttttaaatgtgatgatttatgtatactggcaaatatgcatggaatgagaactatctttaatattaattatctgaaaagattgcttgagcttttagaaaaaatatatactggaaataaaaagagttttttagacatggaaaggctgagcaaaaatattctcaccataggatttattaaattttgcaaaataatataaattaatattatgtaattttaatctatagattaaaaatgatcaatatatggctcttgattgaggaatcacctcaaataacttgcctagaatcagtgccagaatccaggtcttaataacctagaaatctaattcattagcatgcctattgaattagattcccatgtccatccacttttccatgactccagttccatcagtctagttcaaaattctattatttttcttctaagtcactgtaagaaatgatcttagctattgctcttctagaatcatttctcaacacatttctcaataatactttaagtggtcaattaaagatggaaatgaatcctgtaattctctggctcagactttccagtggcttcctattacttcaaaaattaaatccaacctcttagcctatagggtccttcctgctatttctgccacctcatgccctagcactctccacctcattcttttgaaccattatccagccaccttgccccacccacctggaatgtcctgctttagacattggatccccaagcccccttagttctctacatcctcagtccaagccccatctcctctggaggccttccccaacacagacataggcacatttcctcctaaaacttttcaatacctgatgctttatttgttgatttattgtcacacttctactatacgttaagttctgcagtgcaagcacctcacctgttttattcacaactctgcatccagttcttagaactgtacctaacactctaatggttctcagtgtttgtttattcatttatttattgatttaaaaatgaagttttttttctgctgtttgatgacagtgcaacctattcttatctcaaataattaaaatgtactctcttttttgatgtttggatctgagcactaattttcatccaatttagagtggctaattgcaaaataagagaggatgatgtgataagtttttgtggtatttaagatgaataacacttgtttatttttagtgacatgatgaacaaagaattattcaagatgtgccctagatttccgctggtagccattaccctatgaacagggtaccccgatgtgttttatttaaaagcttcacattggacctcatgatcacgcactagattcatggtttattaacccacattaactgaccgactgataagttaaacattgtggaaaggattcactcccagcatctccccaaggtgcagccatatatgctggatacagataccccttgtttttcttgtttatatttataacccaggtacttaggcactgagatttctgtctgtttttcctttcactttttcaaggcataagctatcttcttagaacctccttcctattctctggtcaaggtttgaataatacccacttgtttctagaaatgtccctcatacacacttccatgcttggagcagctggtagctttttacaacagttgattcttcccattcaatactgagcatatgggttggagtctccttctaaaaactgagcgtctgggttttcagaagttccaggaaatctgtaatgtaaggcagaagcacaaactctttgtgaagaatgaaggaaataaatggatcttgtataagaagtttcaggaaatatctgtatggatgaagcatttgaggaaaaaagatgatactcttgaaataagattttattttaagcccatagaaaatctaaagatagtgttaaagttctggaagggttttgatgagaattgtctgatgggtctcatcatattgcataatgaattaaacaagttttgcaccaacttcatttattgacatacatagtccttaagactccttctcaaactcagtgagtaagaacttctttatctttagatggctttgttgacatgattatctaaccctgtggtttcacttggtcttctttaccttacatacatccttgcatgtcaactgtcttccactttcctgggttcatttcatcaccctgagtctcacaggacttgttaaaacttcttgaatacttccaaagaattcattgatattaaaatatatttaaattattaataaccaaaccatgtggttctggaatagtaataaactgtgtgttagtctgctctcacattgctataaagaaatatctgagactacataatttataaagaaaagaggtttaattgactcacatttctgcaggctgtagaagaagcatgatgctggcatcggcttggcttctggggaggcctcaggaaacttacaatcatggtggaaggtgaaggagcaggcacatcacatggccagagccagagcaagagagtcaggagggaggtgccacatgcttttaaatgaccagatctcatgagaactgactcactaacatgagaatagtaccaggggatggctctaaacaattcctgagaaaactgcccccctaatccagttacctcccaccaggcctcacctccagcattgaggattacaattcgacatgagatttgggcaaggacacacatccaaactatattaaattgatagataaatgaaacaaagcacagattctagaaaatgttccaagaatatttgggaatatagcatttaagtcagtggagaaaagatggattattcaacaactaacgttggagtaagtggctagacactgaaaagaagccaaggccttaaaataattatagatgaatcagtagttcaaattttagagttataccatataaatactctatgaaaatatggatgttttggtgatttgagagctgaaggttttttaaggtctaacatcccagctagaaaccacagaagaaaaaaataattgattgaccacttaaaatgataaacttttatatagaaaatatgtcattaggcaaagtttgaagaatgagaaagtgaggaacatatttgtactgtaggtcaggattaatatctctaaaatatatattttaaaactcctacaaagcattgaataaaagattaatattcccatatagaaaaaatgtgcaaaggacataaacagataattcacaataggatcaataaaaatggccaataaacatgaaaatatatataacattccagatattctgcaaaaacaacagcatttttttccctcatttatttgatttgcacacaacaatcttgctaacacaacacgtaaataaaatatagggaaatgggctgggtgtggtggctcacatctataatcccagcactttgggaggccgaggtgggcggatcacgagatcaggagattgagaccatcctggctaacacggtgaaaccccatctctactaaaaatacattagccgggcgtggtggtgggtgcctgtagtcccagctactcaggaggctgaggcaggagactcgcttgaacctgggaggtggagattgcagtgagccgagatcacgtcactgcactccagcctgggtgacagagtgagactttgtctcaaaaaaaaaaaaaaaacacacacacacaaaacaaaaaaacaggaaaatggacacacttatgcactgtggtacaatgtttctcaagggctgttggtaaaaggcaccaaaaatagaaattcaacttctaggaaattatttaaaggaaggaaatgagcttgtgtgtcaagagataaatgttaatgatcattgtagttttgcttgttatattggcaaagaaagtaaaaagattcaagttcagcatcctaatactgttcctaatatggaaacgagcatgacttatatttcttatagaatagtatgcagctgttaattagggtgtcagtctaccttaattgtaataggaagacagccacaatgttattgaatgaaaaagttgactacccgatgccatgtataacatgataccatttatttaaaagtgtgcacatttacatttatgaactcaatatgatccatcacatgggcttttgctattcaaaataaaatatcatatcacctttttaaaatttcaaattaaaaggcccaagtcaccaagttgcctcttttctctttctagggcttcctctcatgatagtccatgatggtctcagcaagttatcaaggtgctgtccatagggtcagttcagactacttttggctcatagctggagccagatattagccacattcccttgatgctggagatcaccacaaataccacttaaacctggttcctttgaatagcatcatcagttacccagccaaagacctggaggttgcaacttcactctgcctgtttgacatgtccaagtccacagctgaagaacagcataattctcatcaagtccgaatggcatgaccaagtctgagcctctgtttctggtagtcactcctggccctagagcagattttttcaagaaagcacaagtggtcctttgatgaacgagagagaaatattactgtgacccaactgtgtacacctgtcaaactgggtctgctctctcaatgcttcagctttacagattgtaccacttccgtgcccccgaccctagccccagctgctttcccagggggcaagacaggtttgatggattccagcgtgtactaatcttagggcatagtgcatggaaatgcccacccatcttgtctttctctatctctatggggatttctttacagagaggtctttttgatcaaactggatctacccaatacatttctgtatcttttaatattaatgaaaatggctgggctttggaacttctcctccagaaggtctgtgtactccatttgtagtgtttttcttcatatatctcagcaatattcaaactcagagtaccagcagtatgtttggaaaacagcaaattaaaatttaattttgcttgacaccacctctcccaatagtatttttggaaaacagaaaattaaaatttagttttgcttgacacctacctcttccactgggaaaaaaatgggtgttacagggtgagagacaatagaaattatttaggatgcattttcagcaacatttcaacttggctatttccaggcaataagatttaaggtgatttgtctataattttttccttcattttagtttggaaaagagcatgtaacattttaaaaagaaggtaaaaagctatttatttttggaaaaaaaaatttctcaaatctctttgtgcaaactcttgctattagagcttggacaaattatttaatgtttgtaggcccccttaacctatatgtgaaatggaagagtatgattacttacctttagtcgaaaaatgttctcttattttcctaaaagaaataattcacaatagtacagaggaggtgacacactgtgttgtgttttcattttaaaaatgagaagttggtgagatagtctttaaggtctatctctgctttaacattcagtgagctttggaaaaattaatgacttagaagacacacgagacaactcttggaagaggttggcgccgctaactctattgacttaaatgatcacatttagttggagctccttcagaatgagatctcttatttaccaattgcagagatttatttcctttatttgtctagttaaaaggcactgggaaaaatgaggccagtccctcactcttcaagggagctcttatttccctgcactgcctattagactggggatagctgaaagtttttcattgcttttacttaggacacgtttgtaaggcatattttacgaaggttgcttcaacagacttttcaaccccctcagcaaccattcgctcattctgctcttttgcttaacattgtccttttttgccctcatgatctgagaccacatttgactgagatgagttgatttgtctggcattcctcttctctgtttcactcatattctctctcaggactttctttccatgataatttgttggggtcattctttaggtttgtaattttcaacaaatgtcattcaaactgttttgtcttattcatggatttgcctctaacatgcatataattacctattaaagcatagcatttgaactattctaaagcaaaagatcttgtaaatcactgtagtactgttaggattggaactcagaaatcaagtctcaaggggaaacacgttgcttggttaggatagttgtccatcctgccagaattcagatgtagctgctatggaactgaatgtttgtgcctctccccactcaattcattgttgaaatcttaaagctccaaagtgatgctgttaagatgaggggctttatgggaggtgaataggtcatgagggtggagcattcatgaatggaattggtgtccctgtaaaagagaccccagaaacctctcttgttccttctgagatgcggtgacacagcaaaaagacagacatcatttatgaaccaggaagtaggccctcaccggacactgaatctggcggcaccttaatcttgggcttcccagcctccagaactgtgagaaatacatttttgtttataagccacacagtcttttgtgtatattctgtgattgcagcctgaaaggattaagtcaggagctaaatctggatcccaattctgtgctcttttctacctctattctcctctcctccctctcttccttcttttttcctctaaattatttaacttaaaacactttaaatcacaaatgactagaataaaaatgtgaaatcccccatcagagaattccaccctcaccctctcctttttagttgtagccactattttgatttgtcttaataaccattttttatatgcgggagatttatgtatatatgatatacatatatatgtctcatgtggagtttttcttttttgtgtgaaaatgaattgtgataaatgcataattctgtgactttttaaaaaatgtaataagctctggatatgtttttggttaagtagatctagttctacattatctttaatccaaccgtgataagtgaggacgataatatatttaaccatttttctattaatgatcattcagccccttttaaatattctttataaaaacaatgctacaataaatatcttttaaacatatgtgcaagtattttctcacaatcgtgcaagatctagtttatgtactttgtcaaatgtacttggtcatagttttctgctgggcgtgaaagaagatagcctggcactgactacattcttattggccccagaggggagcttgatcaatgccaaacaggggatatgagggagctggctgataaattactctccctccacccgataagttgttatgagacacagtgtttccaatgccccttcaggagatgggctgtgtaggtgagcaaccagatatggtttctaatgagaccacaaccaaattaattatataacattttgtattttatttttgcctttctttgcctcattttcttttttccttactctagcttccttgcgattatactcctcataagactttctatgtaaatattgtctcaggctttgttttctagaaaaggcgggcttagaaaaagatatatattgaaaagacaaattattaggtcagagggtatgcgagtttgggccaccctactttttaatcaggtacatgcaattacaaatatgtagttatcttttcttttattttctattaattatcaatatttcaattatgaaaagaactatattattattatatacattatataaagtaatatattgttacattatgagcattcaatcttagtgcagaacctctctgtctggatgtatattcaggtaaaatgttacacgaattcctgttaagtgatgagaattccagtgctttaattttgcagctaaataaagcaaagcccaaagccggaattaattctttattcttctctatattacatcataaagcagttattcctcccacagaagccatctctcagaaaatatgaagtggttcaaaaaaacatcattaggacaccctacattacatgttgctgttgggaagattttatacagcataagctttcataagttcataatggggagataacttgattaaccttttgcccaagttttgccataatattgaaacaacagagaaattaaagaatatatctatatttttttctatttggttttccaggaaaaagtggttgtaggttaagtgagaagtggttagcatctagaacaaataggatttctcacaacttggggaactgaatctaatctctggcttgtcaacttgccaaggtgttcttaataccatccccagaaatcctaattcaaactcacattttggcttctggcgactgcccggcaacagcgaacatgcagctcactccaccacatccattctgtgggagtccctgtaggactgtattttcaaatgagcatgtaattcacaatactccttcatcgtgagaatgtgggggaacaacagatagcccttaaatcatggattgggagctagagtgtaacttgctaggtcaggcacaccccttcatatactcatcctgtattgttggccattcatatggagataggttcacagaggaaatttctattgccctgttaatgaaggccctctttacatcttttcatcgatttactgtggctgttctgacctggctgcactgacaggaccttgaggcttaatcatgagtagaaagaagagcctgaattttcctggagagtttccaagggagatgcttgtagcaacaaattcctatttagatcaggaaattcgagaaagtaggtgttaagtagatatatgagagttgtgttggctttccatatttgcttaaagtgggaaaatggattgtgtggcgatttggataactcctgaaaccaatgtgctcagccaaatgtaaatgtggggttgcaacactgatgtgagaggaaaggaaattgttgatggagtggaaatgcttcagctgtgcttagattgccagtgagccagatacacctgtgttggcttggcgtgaggactgcatggatttgcgaaatgaaaacctcacttacattctaaccagattaaagacactgatgaagtcaggccagttttactctgcaattaggaaaactgaggctctcttcagtagtcatctcttgaaacacactgctttgcagtgctttgttgaagaagtggtatttatctaacgcctatcagcctggaaaccgtatcttgaatccagtgttgccactcctcaaattgcagcttcctggtggcaactgaacaagcaagttcatacagcaaaggggagaaaactaaaaggtcatagcatcccttccatgattagcattctgtctttgaccacctctagtttctgaaataaacagaaactttgtagtaaaatcttaagaaaatgttttaatttttttcaaagtaactcatataagtagttgcagaaaatagaaaagtatggaaaatcttatgatggaaaacaacattcttctttgaggtgttaaggtctgttaactattacagaataaattaatatataatatgtaacttggctgtatgtattttcagcactgttggtatggtttggctctctgtgtccccacccaaatctcaccttgacttataataatccccacgtgtcaagggcaggaccaggtggagaaaattgaatcatgggcgtggcttcctcccatgctgtgatagtgagtgagttctcataagagccgttggttttatacggggcttccgccttcactcagcgctcattttctctcctgctgccctgtgaagaggtacccatccctgagattgtaagtttcctgaggcctcctcagccacgcagactgtgagtcaattaaacctctttactttataaattacccagcctcgggtatttcttcatagcagcgtgagaatggactaatacaactgtattttaggaaacgtgctacattaaagatggctgctaattgatgtgcgtgtgtgtgtctctctgtgtgtgtgtgtgtgttggcggggtctatgtctataactcgtctctttaaatttgggtggctctgtgagtgttctgaccaaatgaatatgcagacatgattctgctccagttttatggcttaggcttgaggagactataagctgcttcttcctgtctcttggatatttacttgtggaactcagtttccatgctgtgagaaaactcaattattccagtgaagagtctcaggtaaaaagaactaaggccctcaactgaggacagcctcagctgagcttgcagccaacagccagcactaacttgtgatcctgagtcagctatcttggaagtggatactccagttccatgtaaactgcccagctaataccacgtggagaaggagaattgcctagccatgcctgcccaaattcacgacttgcaaaattgtgtcatataataaaatagtggctgtgttaagcattggattttggggtagttgttatgcagaacaagaagttagctataatggaagcatacagaacttgcagacttagtgccctgatttcaaattctggttctaacatttcatagctatgtaactttggggacagctattaagccactgtcagccttaaagaaaagtttccttatctgtaaaatggcagtaaaaatatatctcttaaaggctgtggtgaggattagagacaaagtgtgtaatatgactattacattttctggaaaatgataacagcttgacatagtagcaattatttgctattcaccagttaacccacttctctgtaccttcttctttttaagcagatcttccagaccagggtattgctgaggagaatatcttttttgaaaaccaacttagtggagtaatttaaagatctacaatgttgatatatctttcattaagtaattttattttattactgtattctaaggaaatatttctaaatactggccatagtacgtctatccaggaaataagatgcttatgtatgttcctgatctctatgcatcgctttaaaaaattctgcatgttcattattttgaagtgcatcactgtgttttagacacaccaaccaaggtgttggaaggcaatggctgaatctgcctcctcaagataacaccatccccaacatacttaggaactatcaacaacaattagggaggttatgtatatatgaaataattcaatgaggaagtgtaacttttgagaagtgccttttattctacaaatatttattgaatagcaacaaagttctagattctgggcacaatccaggagaacagagatgaaaccacagcctttgtgcttttctagagagtctgatgagttgccgttctgggcagagtcaagactgcttctcaaacattctatatgtctcaaacatgtcttcacctccatgcttcattgttagtctttcttctcaaaaccatcttccactttatcagtcaaaacattttgcatgactcaatttgagctccacctcctccaagcaatcttcctggatctgtgctatacaacttctagctccaatctgtcccctgttgctgacttcttgtagaactcaatgtgttctcgtttctggccactctgtgtggctagttttcttttttaaatgtctgtattatttccacaactagatgaaaaattcttcatcagtgcatctcaaacatgtttcttatgcacatatgagatagttaggggtcttgttaaaatgcagattctgattctgtagatttggggcaaaaccttagattcttcacagttaacaagctccagatgaagtccctgctgctagatctcagactacagcttgagtagcaagtacctaggttgtagagggcagagaccaccctgttactctgtttcttacagtccctggggcatgaaagagttcagtgattgttttggtggtatagtacacagaaaagtatcgcagactggtaaagtttgatatttgtcccctctaaatctcatgctgaaatttgattcccagtgttggaggtggggtctaatggaagatgtctggttcatgagggtggatccctcatgagtagtttggtactgtattcccagtaatgagttctaactctgttaactccctcaagagtttccttctctccacccatgagaactgattgttaaaaatatcctggcacctccctttctcttcctttctttttcaccacgtgatgctacttccctttgccttttgctatgagtggaagcaggttgaggtcctcagcagaagcagatgctggtgccatgcttcttgtacagtctgcagaaccatgagccaaacttattttatttacaaattacccagcctcaggtatattctttattgcgatgcaaatggattaagacacaggccttggaacaattttgacctaggttacaatatcagttttactacttaatgatctggatgattgtgagcattttattcacttataaagcacacttacagagtttttgtgaagtcaaaagtaacatatattttaaagcacttggcatagcagtcatggatagcaagggactgacatataagatatatttcctgttaatggcactgaacaaaatccatgtgttttcaggctaaaatatttcttcactagagttgatcttgatattgtgcaataaatatcttaagaggaaagaagctactaatataagctttggcttgagttttaaattttattatacatatattttatcagttctaatatatataccaaaaaatgtagagaaaaaatcatgccgagtgaaaatgggccaagtgtagccacatgttgcttctagtctcttatagtataaagcttccttgaagacaattaaagctgatcaataataattaaggagacagtaatgtcactcttcctgctacaatggtttctacccagcctgtttgtcagagatagtgtctaggtgttctgcagataaagccctgacaaagaccctcaagaagataactcagggtgaatacaagaagggttggctgcaagcattcagtgctcaaacagctgcattgggaaaggcactgattgctgaagatagccccgtgctagacctcctgagtcagctcttcttgtccactggatgaaaaagtggttgcaatatctcccaggttctgacagtttgtatttcaaatgtgagagattagtaatttttctttcatggattacatgtcagagtagcaaaataattggtagaggaaagttatcttttgaaaagaatcacagctaataaatgagaagaaatgatagagaaaaccacatttgcaaaacttcatatgtctagataatggtcattaatagttgctaaaactgttagataagaaacactagatgttaaattttataatagatggatcaggctgacatgacctgaattcactaattaatctttccattactaaaagaggaacaaacgggacattatttttcttttgatgtaaggcaatagaaagcatacagagacactaaacagtgtttaaaaaacgacatatctagtcaggcctctagatctaactcccagtttacaaaaaatatgaggatggagggtcatgttaaatgacatcacaatgctttgatcagtgaaacctagatattccacaagacaaaggatttagttgtttaaagaaaaagaacaaatagcacacaaagaggaagaattataatattttaagagagacttgtgatacacataatctaaatgtaatgtgtgaaccttgtttggatcctgattcaaacaaactaactttattgttaatttcataatacctctactgaagtcattttttaaaaagttctatctgttgagatacttactggagtatctattgataacagatgcccacctttactaggaatctgtgacatacagattcaaagaaataaaatatctcccctgttagagtagccaaaattaaaatgtttgtgctgacaattggaagcaaaagtgggagtgaataaaaactcatgcatttggtgagtgttcaaatagtagaatcattttggagagcaattttgtggtatttagcaaagttgaaattgtatgttctttatgtcaaaagtttcaggaatttccagaattccctttctagttctgtgagtcagctgatttaggctggttggacaacttcatctcctgcttatggatctggctaggctaggtttcttatttagatttggactcaggcctatcccgtgttgttatattttttaaaaaaattgatagacttcatagttttagattgacagaaataataccaagacttaacataaaccactctcctcctgcataatttcccctagtattatattagtacagtacatttggtacagatattgaatcaatattgatatgttgctattaattgatatccataatttttctcgatttctttaggttttatgtattatctattttctgtcccaggatcccatctgagatatcatagtacatttagttgttatgtctttttagtctcctacaggctgtgacagtttcttaggcttcccttgttttcaatgaccttgacagtcttgaggagtactggtcaggtattaatattttggaggatgcccttatattaaaatctttccaatgtttttgtcattattagatggagattatggattttggtacacaggatcacagaaataaagtgcaattttcatcaaatgatatcaagggtacatactatcaacatgacttatgattgttgatcgtataattgtttaccttaatcatctgctgaagcagtgcttgtcaggtttctttactataaatttgctgactccagctttccatactgtaggcttttcctagattccacatggtacagtatgtgcagcctgcacttgagtggggagttatgcacttcctcctttaggatagagtatctgtgtgacttatttggaattcttctgcatggcagatttttctcttctctccgacttgttaatttattcaatcatttatttatatgagtataggctctttgatttttaaaatatctggggttacaattcaagactatttatttcattgtttatattgttccaattttgactatttccttttgtctcttgtgtccctttgacatatctctgtgtgtgtgtgtgtgtgtgtgtgtgtgtgtgtgtgtgcatttttctcaagcatttcttaatgggctgcaagatgctccaggctcattttgtatattttgtgcccccaccctagaatcagtcgtttgtctaagcagccttgtttctttattgaaaaatagtattagaaaacaagatctgactgcagtgtgtgctcagtgctcctacagtgtcacttcttatgggcttgcttggctgacagagcaaagaaatatttacgtatactaatccatatttgtccaattatctataaacatttctatatataaaatgaagtgcatctatattaaaaattaaacataagttgttacaattaggtacaattaataaatcattaattggtatgtctctaactctaattcattaccacatgggtcactctagataagttttcctttcttgtttggaatcttccgtttaacaatgaaaaccagcatccaccatccatttacgtaattgttcattattagtgtacacatacaacagtgtcagaattgttaatccataccacatgggaaacaattttattagccagagtacagtgtctaggtgcagttactttcacctttaatcttacaaattccactcatttccaaagctactttcttcatcacgttttctccctaaccctcttcagtgagtctgtttcatacatttgtaacacagttaaattcctctgtcacattctgcattctttcctgggatcccccaacctcctaaataatttaacaaatttgttatacatgaaggttcattctttgtgttgtaaaattctatgaattttgataaatgtataatgtcatgtgccttattacagtattatacaaaatagttttaccatcctaaaaattccctgtgcttctctcctcctctttctctaaacccctagcaagcaatgaatgttttacagtctctatagttttgtcctttccaggatgtcatataattggaattctaaactatgtagcctttttgtactggcttctttcacttagcattatgcatttaggattcctctatgtcctttgtagtttgatagtatgtttcttttttaccaaagagtagcattccattgtatgaggtaccacagtttgtttatccactcacctattgaagggcgtattagctgttttcagtttggggtgattatgaataaaagtactataaacctttgtgtgcacatttttgtgtagatatgcattttcaactcattagtatcaacaactagaagcaattggtggattgcatggtaagactatgttatctatgtaagaaactactaaattgtcttccaaagtggctgtagccttttgcattatcaccagcaatgaagatgacagttcccattgctctgcattcttgcaaacatttggtattgccaatttttttgagctatgctaataggtgtttagagatatctcattgttgttttaattttcagtttcctattgatgaaatatattgagaatccttttattaggtgatttgtcacttgtggatctttgttgagatgtgtcttcagatcttttgctcacttaaaaattttttttaattaaatgttgagtttttaatacagtttagatataagtcctttatcaggcatgtgttttgcaaatattttctcccagtctgtgtggcttgtcttctctgtctcttaacactcattttatttttacttttgggactaaagatgagggatgatcagcttcctgttcttcttgtaataataatggcagagccaagagagaatgcatcaaccttgtaatcccattggaagaccctgattgtgtcaagtccgctaatgttacatggagtaaacaaagtcacatggtcaaatcctacattaatgaaatggggtagtatatgcagttaggggatggggaataataaatgctttttaagaataatataatctgccatgccatctatgagctgatactagctttctattaatttattctgtggtttgtttaacgttggaatctctctgaaagatccttcaaccttcctgggagactctaatctgagaaagccattaaaaacgcgtttcttttttttggcataatttaaattcttagacatcgttcacatttattaatgttacatacataagaatttacccaccatattcctccttgagtccagttcagtataaaaaaaatgttgacttctccccagtatctcttcatggtttacagcatgaaattctgttctataaccatttttcacaattgtctaacaatgttataatagattggttgcttactaccaatttttaaaaaagtcatggcttctccagtcacttcttgcttatcaaaattatttcatgaggtggtttaggccttgcatatttgaatatggggtttgctcctttctacttaaaaaacaacttggatcacactgtcttgtcctgataacttggtagaagttgcttcatcattgttattcttgttgtggtggtggttattaatattgtttcatattctattttaagaattaaaattttaaagaagatcaatgtctttgagtatcttccaaattccagtacatttttaaaaaaagtaactaatgttatcagctttgtatgtttaaaaagaagtaactaatgctatcggctttgtatgttatcactcaagactattttatatgtctttagttatatacgtgtttgtatactgtatatatattattccatttcttctagaagaattgatttttgaacagaactttttcttttcccagatggaccctccttaggaatcttttgttgatccttgaagtttggtaacatcttcaaatgtgtatatctccctgttaattattttatggcattttcctggacatttttatacatatgtatacttaaaatgaaagaataatgttccaaaatatggtagaagaaaaaattcttttctttcagaggtttccaacacattttattttgcagataactgattttaagcttttgaggaccaacatctctatcaattcctataaaatgtccaattagtttcagttacatagcaggctgttcagtactgcacaccatactatggctggtggtctggtcacacatgtataaaggctgcccactggttcctggagcacggcgtgtccaagtgaacgcctcttccagggagcttcgttttcccaggggtggtttcctttggcaagaagttggtcagtttacacatgtggctttcgtgcctgtgagcaggaagtgtctgaaacttgcaggatgctctgctttttctcttatgaagacagacacctgagaatccagtgcccttatgcttaatgacaggaattcctcctcattgtttagtaggttaggatataagaaagcctctttttaagtaacacagataacctttttagattacttatttattctagaactataaaattcaagaaaatataggtcccatgaaagatttaagagttttaaaaaactaaaatctagtttctcccagcaaatagtacttcaagcaaaacccttccaatgtttctaaaataatactgaaagggcatctgattataccagagcaatttaaagaagtatatatttatttgaataataagcttacattttagctgcaattttggcaatgcagatttttaacatggatcacagaaaatgtgcacaaaaaaagtactagtgcaaaggactaaacaatgctaagaattagactaaatacagctgctgcatttaagaaaacaaaaggcctgaaatcactataaaaatataaaatgtattaaacactaccgtccatagaacagtctttattattaattatgtttaaaattatttgcatagttaattatacattgaattgtaaatgagtattatacatgaacctcctttttgaagggaattctttgttgcattatgaaatgtctaatgacattatattgcaaaaagtatcctttttttctattgataaaggaaaccattaatggtattactgtaaatacaaggaaggctacagaaaaagaaatacaatttcattttttcaaagtgtttttcatgcagtgaagtacttgctgtgttgaactgaatgtcctgtgtctaagatgctcttgaatgacaagacaaggcttttcaattcaaagactagaagtaatcatgtaaccctcttatgactgggataccgtcgtgtgccactcaccaacgctgtctttccagaaaaccattcaagacacttaaaaaaccatgacttacctgataaataaacataaaatgaaaagacatcaactgccatttgacattgctattggtaatgtctgtcctatgtgaaagcacttttaaaaagagagcacctatgtgtaagagataagtgtctagagattcaaaatgaatcaacagtatcaggtaacaatataattctcaactcagaagctgactcaagattaggggcaatttcagttaatgtaacaggaaaaaaagacaatggattttattttgttgatgtatccactcacaaattgacttagggtcaccagatgtgtagacacaatgagatttttattgtttatagtctttaatggaagcgatgataaaggaaatagatctattttaaaacaaaaccaaaaagctatttctgtctagattaagaagtggccccaggtgtgggattcacattttgagtggctactcgggcaacctcaatgatccagggttggtctatgattccagctgcatggctgcccttctctgcaatcccaataatccatgcttggtggcctccaccacatttgggggagtttatctctgcacagaaccaagctgcttgctcatgtggtaaacagatcagaatgcctcctgctgtctctggacatgttccctgcatgaggctgaacatgtttccacaggccttgctcatcacagtcatcttggccagcacagggaccgttgtgaattgcaaaaaaccattcctcagctgcttggtcaggttctgtgtatgaccccaaatcctaatgcccacgatgtccgtggctgcatgggcactgaacgtgtgcatgatgaagctttcctgttgaacttcaccatgttcattattgcttcttggtatgtcaactctacatcttcgtgggtgaccactagtttatttcatttttcaggaatatccagccactgctatttgatacaagtgacagtcgtgcacagccactccacttgtgcccccaggggttttgtggactccagcacatcccctggcgctgtattgtctggcatgataaattgattggcctgtagttgtagtgactcctcccaaaacaatccaggaggttagcactgtttggccacaagttacagacattcctgcttcctcggctgcatctttaaaaccctgcataatcaggggcatcactttatccctttccctgtcagttgtttcattattgatgaaagaaaaaatgtattcagattgatttctttagttcagaaattgtttcttttattgtatctttggacatttttttcttttattgttctgtttccttttacttcaaaaacacctattatgtatatactggatcccatgttctacatatattatccttcttaaacttatgaattctttttccaatttcatgtttctcattttagttgtccaaagcctgtttcaaatgtcccttggctgttttcagtgggttcaattctacttcatactgactacaaattgttttcatttccatgattttttattataccttccatttatttactgatatctgccagcttcgtattcatttccttactacaccttatatttctttttttgattggtttatctttcatttatattctgatttcaatgaggttatactttctataatttatagaatgtcataaaaatcttttaaatgttcccctgcttcctggtatgaccttgaagagcagtctttatatgccttctgtttgttattattattttcattctttttacttgttgtctatactgaaccctaatggattataaattatatttgtggtgctcattttggggctagctgttggagcagatatgatacaggctggggaaatgaaccagcagaaaggcaggttcatccaggcttgttgtttctaagcacctcaccaactctgccccagggtgtatgtgctctgtgctctcagagtgaggctagcagggcccttgaggagtcaggaatccctgtgccaaattgttcagtcctgtatgtcacaagtctctctctctttcttttctttctctttctctcccttcagtattttatgtgtttattttccttcagctgatcgtaagaggcagctgcaaggcagaaaacctacccaggccaccctagaatctggccccttgagcagatagatgcctgcagatttcctcatttgttcctcttgcctaaaccttacaggggtgagaattcagtgctgggtcaatagctcctcaaacccttgaccttgctctcctaaataagggaattgtactttggactcttcaagtccttgctacataatgttaaaggttttctgtcatgcgagaacataaaggtacatgttatcatgttttatccttgtgtcttccataaactgtatacatttaacatatggattgtggatattttctaactttaatgaagatggaactctttttctctcatcgtggtgttttcacttggtggtatatgttctttatttcaccatttctaaccatatgtctttctaaattttaagatatgtttttctaagtcaagtggggtagcatgtgcctgtagtcccagatgcttggcaggctgaggcaggaggatcatttgagcccaggagtttgagtccagaaacatagtgagatccctctcttaatgaacagcagaaaagagaagatatataggttttcctaattttagcagtaacatactctatataagaaacttggaaaaaaacattaaatcatacagctaaataagtaaatacatgaacaaacaaataaataacatgacccattacctaccacctagatatatcagtgcttatcagctaacttttatttcttcagtgaatttccatggccttcaaagtcgtcaaagccctatagacaggaaacccattcaattttctttaatcaaatatctaattgtttacctgatgacaataaaaacacaaaatacaaccaatttcaaaagttgttagttaagtgataaaccaagaaatattgattaagactattagttggtgatataattattattaataaaaacaactgaaaaaggtaaaggtagttgcctcatgtatgaggaagtagggaagaggaagaggtaatgtgagatttgcttttcaacttaagcttttattatttgatattttctaactatgtaaatgggttactttgagataaaaatcattcattaaaaataaatcaaaataaatttattttgattacatgtttttgattacatgttactgaaaatgtgttttttgtgtaaaatttttacattttgttaagtgattctcttatcacagtctttaattttcaaccattatgtaataggaattaaataaggaataatacttagatcactgttttggttatgtatgtaaacatcacatttcttgactactgacacacaatgcctgtttccctaatgctttctgattctttgagttctacatcacatgacttacgtcttatgtgtttggttatatgagcaaaaatacacaaatttgtcatgagatcatatatatttcattgtctctttcttatagagtctgttaggggaacacggaaagcatcctcatgccccctgggtgttcttgtttctggatttgtaactcggctttcagagtcttcctactatttctctcagcagctataagaagcaagctcttgtcctgctccttgttacccagttggaagactcctgacttaggcagggagaaaaaagaggcaagtgacacactttccaggtccagatgtcagatgagcttttgaatctccttgggccaattttttctcatccacaaatccagggtgtcagactgagtaactgggaaggtttatttggaaactaaaatgttcagattccacaaaagggtgggataatatcatttgtgtcacataatccttatctaggcagtgatgtcagatgattgcaggcctctatctcatacctctggttgccaaacacctataggagttcacacagatgagcccctatggagcacttgaaatgaggggggcaagcggacctgggtttcactgaagagggaaaatgcagaagcaaatgatttggctactatcacattttgaaatataaagatgtgagagtacgtgggtgttgctggagttggaaaaatagatgagttttagctcacaaatccaatctctttaaatacctggagagactccaagcttcctgcagaaaaccaaaccaaaacaaaacaaaaccactttcttaacctccccttcatttcacgagcatcataatgagagcaaggtatgcataatgaggagctctgcgaggtcagatcaatcataaaagcaggagcaatttaatcccctagaccctgcaaataactgtggcaggaggctgaggccatctttccacaggtttagagaattcatttattcttttgatccgaattttaagttcaaaggattccaaaagcaaaataaaacaaaaggaaaaaaaaaaacccttgggatttgcattacatttgttttgtatggtttattgattttattttgttctctcacacaccatttgaggcaggcacaagaaggatcatttcccccatttcatagccggggtggctgaggcacagaaagattgcgtgacttgttcaatatcacatagtgatttttcaaaggtaggacttaaacctgaggtttctgactctttggcaatttctcctgcctgctcactttgctgctcctcaaagtctttcacacaggtggctcaggaggtaacatatactaagtaccctgtgtggggcctagcagagagtagatgcttaagaaatggtagctactcccttagttttagccactccatgttaggccctacattctgtagtgcaggaccttgtttggtaaagtttttcttaatgatccctgccatgaggaatgaaaaattagacttaccaagcactgtatttggaaaacatgtgggttatgaagtctgcaaaatttgcacccagggctagcacagctaactcattttttgccaggcttttgctctttctttctatttcagtaaaacttccgtcaagtatattcaaacaagatatgactactggcattaacattagtgaaatgtgttaaaatttgtcttcctaagtaaatgagagaactctagtcatgattctgcattgctggaatttgcagatagtttaaaatcaccttccagtcatctatgctctatatgcagggcacatgtttgttttattttctctttttttccctcaattattttatgttggctttgaggctcaggagtcataacactattgcgtgattaattttgtgcctctattatgatggagtttttgtgaaattaactgtgctgtttccttcccagtaatgtcctctgatgaatattttatttctctcaattgctgtgtggtctgccttgcttgatattttgaggtacttttacaaataacaagagcctctgcccctcagagtactgtgcctttgtaggcaatccagaagtcagccaagaaagctcttccctttaagagcacagaacatgtccaatttttgtgcccacaggaaagcaacaagattttcctgacctcccaaaagccatcaattagaaattacaacagcatcagcacagaaaaggggacatagttgcatctcgccatcatggagatgtgttaccaggccagtcgagtcccatgtttatctgagactacagagaattccttgggtttcctatttattctcccctgagcacagtgatggctcttgaatattcgatacagactccctcctggcagctccaagccttatgcagctgcctgtttttctaaggagggcataagttcaggaacaagaaaaaaaacatgctgaaggagtgacaggtgcaggtgcaagtcaagagaaagggaaaaaatggagcagctactgattgccagacactgtgctcggtgctttaaaaatattacctccttaattgtcacaatcacctggtaatggggttatgatctccaatctacatataagacctctggagctcagagaggttaagtaacttgtctaaggagcctggtgtccagcattcaaatatttgttaagtcaatcatgaatgaataaatgttatacagccaatgcaaggagtgaatgaagagagccccttttaactctgttttataggaataaatattctctgtggcagtgggaagacctagcagactgggcatgggagcttatgaagcaaagtagtttgaatgaattgctggcaagataaggacagtgatgtgtctctgttttcccagtgtgcactctgtagtctgtagtttttgtactgtagtctttgtacgaagtcctgagtgatggctctggccattccatgtcccactccatccttgatttgccagagtcatcaagaggtccccagcgttagctgagctacttgatgtgatctcgttatacataatcctgcgtatggcaactaagaactggaaacaaccatcaaagtcctaaaaattttctgccttttggggcacttggaagtaaggtaaagaatgaagcactttggggttagacaacaaacatgattttcacatgtaagtgacatgggctgtgccctgcaatcctgctcatgaacttatgtctttcttcaggccctgtttctactaaatcttgtgattttccagatttcactgagagcagattttataccccctttgaaataatttggtttctgcattcaaaacttctgttattgtgatggtctggagggcaagctgcagaaaatgctttcttccccatgaattaaacgctcttaggcaaaaggaaagagggtgtgagattgtcgtgcctgcctgaaagcaggcaggtatctccagcatccatatcaaagccttcagtgctcatggtgacattaataataaatgacgaatttcttgcaggctttcaattcagcaacattgcttttcctgtggttaggtcagttccagtatgtttggctctagtatttcagaagtctcctgacaaacaaatgcaaaaagaattagcagcgtgcaatgattttgctttgctcaccataaacagccttttagcttaaaaagaaataaaggtacagtttttcaagtgaatcttggttattaaagcttctctgaggattactaatctaagtaactgctagcgtggtcttgagttctcttttctgatattgatgggccaattagatggaactaggtgacagaaattgggctagttacccaaggtggtactagaaacagtgttggtgggcttcacctctctgccatagcagagggcagttggaaaacaaaacaaaacttccactaatttctctccatccccactggacctgccaaaccaccactcttaactctcaaatgaccacgcagaaatctcactgctctttatgcttcccctttctgctccaatttagaaagccatggtgcacttttgaaacaaatgctatcttaagcaattgattccgtggttgaaaccttccaatgactttctattgcactttgtataaaatccaaaatcctaccatggctcctaaggggcccagcagtgtccctggtctcatgtctgtggctctgttgctccattacttactgttatctagccatgccggacttccagaaaaccctgggactcagcgggctcttccctcactgctgcagcctctgcacatgctatctcacacctctgccttcactgtcttcctctgtctctgtctcacctatattttcccttcaggtctcagtttaaagttgcatccccagaaagtctccctgattaaaataaaaatatacattcatacttaggacttaagatgaggactgtttgctagtgtatattttacttgagatttttttaaagcctgccttccttctggtttataaactcagttgagcaataatcaaggctgttttatataccactatatccttagcacctaacagagtgcctgacacttaagaggtgttataaatatttattgaatgaattaaaaaatggcatcttgtgccctctatcaattttatttacctttatttttaaagccactgtatgggatatccagtttcagccctcaggtaaacgggcacagctttgctgggtgttcatactgctcgatgggcttgctggctgctgccccacagctgagcatgtatttcgtgtcctaacccaggtttggcccttgcaacctgacctcagacccattgttctaaattggatctctgattgccctgcctagtagtctgagcctgtgctcaaagcctgttttaatgaaagctttcaaatcttcagttttaaaaatctgtagtatcctgataggtctctctgtagaatagctgtcactctttatatatagctctaagagagtcagaccaagcctaattcaacttcttgtcttggcttgtataactttgaaggctaagtggaaatatttataaattaatcagcattgaaaatatagtggttgttggaatttacaagaagtcaggcctctggaatttcctgaagccatagaacttaagaatgtaaaataacatactttgggaataaaagtataaatagaagtctgatggatataccaactgtgccttcatctaacatttcccttactgctactgtcatgtgaagtcaagagtaagcccattgttttatagagatatcattccaaattctgtgaagacttctcatatatttcattataccatgttttattttattttgataagaacacagcatgagatctatcctcaacaaatatataagttgagttgactataggtataatgttgtacagcagatgtctagggcttattcatgttgtttcagactttttatccattgattagtgactctccattttcttctattcctaggcctttgtcaccaatagtctactctttgattctatgaatttgaccatttgagacacttcatgtaagtgaaatcatgcacgcttggtattcttgtgactggcttattttacttagcgtaatatcctcaaggttcatccatattgttgcacatagcagaatttccttccttttctaaggttgcatagtgttccattgtatgtatatacaacattttcttcatccattcattcatcaatgttttcatatcttgcttattgtaaattgtgttacagtgaatatgggactgtcaatatcttctcaagattcctattgcaattattctgtagaaatacccagaggtgggatttgtgaaaatttaaaacatcttacccttgactctccagacttcttacttgacgctgactctctagaggagtgcaactgcatttattcccgaagtgtctcacaaatactgtagcatgtttaataccgatacccatcaaatatactgattctgtggcaaagaattcatcaaaatctcaatgcatcataaggaaagggacaatgatacagaacatctaagaattctacttcaatatcttctcctttaaaacaacaaaaaaaccaatcctcaacctctcattaataaatgctatgtccctgataggaaaaaagactttcggggctgggtacgatggctcacgcctgtaatcccagcactttgggaggccgaggcaggcgaatcacttgaggtcacgagtttgagactaacctggccaacatggttgaaaccccatctctactaaaaatacaaaaattagccgggcgtggtggcatacgcctgtagtaccagctactcgagaggctggggtgggagaatcacttgaatctgggaggtggaggttgcagtgagccaagattgagccattgcacttcagcctgggctacagagcaagactctgtctcaaaaaaaaaaaaaaaaaaaaaaagtcaaaagactctctggctctcctgatggcattttttttaatcactgtaaacaaaatatcagtgaaaggtcgagtctgtctatgccttccctcttaccaatttacaaaataaacacttactgatttgatcgttagagtttaaactattaaactgaagacataagctctttgaacaaatattgaagggaagagactgattagaaattctcatgaggccaaaatttgatacactgatgattacagcttctcttacgtgtcagggtctttggaagaaaatatggctctagattttctgaagatgcatccagcgtacaccagccagcagactttgggcaatcgtttccttgagtgttcttccagtttattaaacagtaaatcagttttgagttttgctttgtaaactgaactttccaaacaagggtattgaagtgatgcataactgaaggcctaagtgtccgttcatttttgggattcaataagcattattttgaaaacaaaccaacttaatcaatgttagccctacccaaaatgagtttacactaaaatcaaattcttctttttttaaatccacctgaaaaaaatcagtgcagagaattattaggaaaaaattagtgcagagaatgagttttttttttttttttttttttttccccactggggtcaagctctgaatgcattgagaatctcaggaaagtgtaagatgtagtctgggcggtgatttccttcggggctgagggtcatactaaaaagcaggcttggttggaaaggttgattgcatacagtgtgattgtaagctttgtgcctcaccctcactggttacaatgaaaccccactcaatgttaacacattttcaaactctctttgcatctgacatttcaccataaaagcccattactttgggaaagtcatttcttggtagtcattctggttgaaatcgcctccctcaaaaaatcacaaacaggatatgtagggactggtgagactaaggtacagaaactggaataggagaaagggagacaaaaaactagagctgtatcaaccctatttgggctaagagagtgggaaggagcaaaggactatgccagtgagtcaaaggaccctgaggggtgggctggaagatgagagtgcaccatccacaagtcctgcctctttcctggcttcatttataccaaaaacatctatctgggtaaggcagaaaattaatgacacctttggtcccctaaatacgctctagacaaccgactatgtcagaagaaaacacaaagaagagaggttacctaaatgaagggtaactgaatttttcatttggtatagagctttatacacaattttaccaaacatttaatgtgaaatttactgtgtaaaatagcagtttctattgaggccaaggcagacattttctggccacatgtgtataactttcaaaggaccgtgagagacacagagagaagagggaagagacacagttagacagtgagagcaaaggcctacctgtagctttctctgaaccagacagagagtggacaatttggaaagaaaatgcagagccaggagtaaagacaaaaagtgaagttttatgagtttccctctttctcttgctcttcttccttttacttctgtgaatatttgcagaaaattacagtcctgttctacgttttgagagaggatgtagatctcccaactctgaacttgtcacagccgccatttcccactgccaaccacctatggatttcctataagcagagttcattcattgtgaaaattagataattgaaacaatctatctgcttcaggctgctggcttcaggggtgacactcacccgttgccatgacaaataattttcagagtgagattttagccaccataactcactgaacaatatgttgttgccctgttctgtttatcaggaagagaggatttttttttttccaaaatgaaattaattaattatttttattggctcctggagatgataaagcaacctcctgccaattcatcttccagccagcctcctcccttttgcactatgatcctctcccttgctccaaaagaagacatgataaaagagtgcaaggctgtcgatggtgcttgtctgggttcattcagtcacgccttccgggtggcagaatattgattatggtgtgaatcctgaagggattaaatcagatcaggagagaaatccatacctcctgttgcctcacaaatttgcatgcagcaccctcatccaggggttaattacatttctgtatctttctaatcagaaaagtcttcaaaggagatgggcacaggcttggaataatcttcctctgaatttcataggattaaaagcagtcagcaaagctagggctgtgaagccgagacctcagcttctgttgatctctacctagtctctatgtctggagggtgtgtggcccatcaggtgcactcaagaaataattgctgaacaaataaatgaatgcctgagtgaaatgactgtctcacttcactttagacacgttgaattccagtgtcctcccctttttccttttcatcaaaatctgctcttacaattctgtttccatttatgcataagtgcttgaaagcttaaagaagcatttcccaaagcgtgagcacaagcacttctaacctgttccacggaaagaaggttgtatgttcacatgagtttgggaaattgtgcatgctagattctattcttgctgattgaaatacttacaggaatactaaaggctcttcctcttgcagataaaaaaaatctggctgactctgaggaactcaaaatttcctaaactttattaattcacttcacttaattttattcaataaacattaatgaaacatctacaatatgtcaggaaatggtctaggtacagagagggaacagtcagataagtctctgccctgtggaatttacatgctagtgggaaagacagtgcacagtaaataaataaaaatctgatgtatcaaatcatgattagtacaatggagaaacacagagaaggataggaacgttctgatggggaatcaccctttaagaaaatttttgagatagggtctcactctgtcacgagattggagtgcagtggtgcaatcatggctcactgcaacctcaaacccctgggctcaagcaaccctcccacttcagcctcccaaatggctgggactatggataagtgccaccacacctagcaggagttgccattttaagttgagtgcttagtggttactctaaggtgatgtttgagcaaagacctgaaggaggtgagcaaaggatcccctaggggaaaagacattcaggtgagggaagcagcaagtgcaaaggccctgaggaagggacatttctggagcatgtgaggaaaccaagatggccagcacagttggtagatccaggatagggagaaatataggagaaaggtcagtgacgtgacagtggagggggctaggttgcataaactgtatttaactacaaaagtgttttcctttttcttcaagtataatctcttaaaatgctgactgagaagtgctgcccttgctctgaatcctctttgtcctcctgcccagtaaatcacacaattaagaaaagaaagaaaaaaaacataagcaagaacctatttcctcatctgtaaaaaggggaaatataatattatcttcctctcaaagttatttgaaggatgaaataaaataaattttatatgatgacagatatgtggttgcagctcaataaatgttagatctctgcatcctctctccttctcacttcatctcccacaaacctcattgtcaagctgctgtcatctataagcaccaagtgcagaatcaggaaagtcatagcaggccgggtgtggtggttcacgcctgtaatctcagcattttgggtgactgaggcgagcggatgtcaggggtttggatcacgaggtcattatcacgaggtcaggagttttaccaacgtggtgaaaccctgtctgtactaaaaatacaaaaaaattagccaggcatggtggcacgcacctgtaatcccagatactcaggaggctgaggcaggagaatcacttcaacccgggaggcggaggtggcagggagccgagattgcgccactgcactccagcctggcaacagagcgagattctgtctcaaaaaaaaagtcatatcagagcaaccactgaaggtggacagaaacaaaccaaaactgtagtgcacaatatgcagtagatttcactaattaaagatgaggagaaaaaagttccaatgccaaaagaatgaagaaaagagtagatgaaccagcagggatcaggcctgtgggctgtgcacgcagcacggtgtttcagaacaagatgcaggggagccacagggcacagagagtgaggacgacgcctggcatttccagagagacttcttggaatggtgaaggtcagaggtgtctgagggattcatgggaagaagactgggcatttttgacatctcatgttgaacagtattaaatgccctggctgaaaatgtgggtatatatagattctgacagcaaaagactggcaacctcaggtaaaattagagtttctgtttactcatatcataatgaatacattataagactctgtcaatctgatagttatgaaaatgtacctcattgatattttatgcgatatctccccaattaatgtcattgagcatcttgtcatgtttgttggaaattggtgtttaattcattgacatttatcgaggttacttatatgcctgctcttatttctttcatgtagtgcttccattttatttcactcttgctctattgataattatttttagtgttgccagtcttatggtattacaagcaatatttcaatgaataatctcccatccatgtcatcacgtccatgtttgggaatatttgttaggtaaatccctagaagcaaataactggagccaaagtatgtgtatttataatattttttaggaaatgtattttattctgtagtaggcaatagaagaacatattatatatttttaaaaggatcaaagggttaaattgtgaaaattaagtcttaagtcaacctcttctcacctagccacccgtaaatattgctaccagcttgtaagaaatccctcagaaatattccatgcatatataagcaactgtgtacactcaagaatttatttcatcttggtgggtttgtgttttcttctgcattgtagtttatagcaaagctatatagctcttgccaggacactaaataaagcagagacactaggctttgatgtgaatgtttctgataggaacataattccttgttatcttgtcatttagtattaaccattcactgtcatcatgatgcatgtcaccaataaagtgattgtttctttaatttcagtgtgcctaacactttactctggaggaaaagctggctgtcaagatgaggccgtggccacacattttttaacttgcttcaatctggattgcttacttgctgtatttggtacactaagttattctgggatcctttgttgccaccattttgggaattttctgtgcttcttactttccttcctcattttcatgaaaacttcttgtagttttcagagaaaggtgtgtataggagataaacaacttgagatcttcttagttacaacatagtttcaatttatttttattcttgattgatagtttagctgggtattaaattctaccctggtgactgtttttcttcagacttttgaaagcattaatacagcttccagtatcacttttgagaactcagaagacacttgtctttgtttccttttatcttgaagtgtttaaaatctttctaatatctccaataagctaaattgtcacaatgttatgccttggtttattactcatttgctgggtttttgtgagacttttattttctttttttcttgagacagagtctcactctgttgccaaggctggagtgcagtggcttgatctcagctcactgcaacttccgcctcctgggttcaagtgattctcatgcctcagcctctggtgtagctaggattacaggtgggcaccatcacactcagctaattttttctatttgcagtagagggttttgccatgttggtcaggctggtcttgaactcctggcctcaagtgatccgcccacctcagcctcccaaagtgctggaattataggcatgagccactgcactggaccttgtgagacttttcaatatgaaaactgtcttttaatttggggaatttttttgaactagtttattcatgattccttcttgtctattttctttattttctctttcaggaatggttataacttaaatttgtttttctggattgaatcttccgttttctaatctcttgtttcttagttttatgttagtactctattttctggaaatttcttcaagtttatatttcatctctctataagttttgatttctgccaccatacttttgatttctaagagttgctctaatttgtgttctgaattttctcttttagaacatcttattcttgcttcatttgctttagaattaaccatcacactcttttttatcctctttatagaaaaaatgatctccagatttctacttggtttgtgaggggccataattgaatgacgtagagttggagatgatatttagagacatgattactttttgacttgattcttcctcattttaagtgcccccctttactgctaacttcataaatatctgacgctgtcagttcctgtgacttttgaggattatctggtataaattaggctgattctttactttcttcactgtagactcagaactttgttgtctttaattaattttctttccagtttccaaaatatttttgcttttgctaatttttttattctcattctctttgtggttacatatctttttatccttttgttttaaatttagagttgttttaagaaggtgttatgactgaatgtttgtcttgcctaaattcacatgttgaagttctaacctccaatgtgatggtatttggaggtgggaacgttgggaggtaattagttttggacaaggtcattaggatgaggtcccaatgatagaattataaagtccttattaaaaaaggaagaaaaaccaggcctcactgttttcatgtgagcatacagtgtaaagactgctatctgtaagccaggaacaggtcctcactacttactaaatttctagcaccttgatcttggacttcccagtctcatagtctacccaggactgtgatgaatgaatggccacccagtctatggaattttgttatagcagcctgagctgactaatacaaaggatgtaaaattagatttgtatttttaatccatcatcttaacctggaacctccttgacatcttggtttttggggggagagcgggaattgaggaaagtccagagcataagatactgctgaaaggagaacactaaaatatgtttagggtaggtgcacctggggagtccaggggaagcatgaagacccttgttatcttttttttttttttttttttttttttttttttttttttgagatggagtctcactctgtcgcccaggctggagtgcagtggcgcgatctcggctcactgcaagctcagcctcccgggttcacgccattctcctgcctcagcctcccgagtagctgggactacaggtgcccgccaccgcgcccggctaattttttttgtatttttattagagacggggtttcaccgtgttagtcaggatgatctcgatctcctaacctcctgatccgcccacctcagcctcccaaagtgctgggatgacaggcgtgagccaccgcgcccggccgacccttgttatctttcagggatgagaaagagcaacgggactcattgagggtaagcatcacctgcttcagcctttgatttcttagcattccagagccaaggtatggcttcacgacattcagaaaagtgagggagacaggatgttttctgctgtggagatgcatcaaagaagactccattgccagttttaagagtggctaaatttaaaacggggtgtattctgtgtaggcgtgtgctggtaatgaatgtctcagcatgtaattgcacagttccttgtggcatatttttaagtactgtatttgcagatgaccttttacagaggtaaattgcatataaggggctgtaagtgccacatttaataatgcttcagggacattaggaagaaagtaacagttattattcgccaatagcctgccattattaacttacaggcaggttactgagcagtgaccaacactcagcaacagatgtctccttctccagctttaagaactgatcacaactagccaaggcatatgcaagatgttaagggaaaaaagtagaaaaaataagataggaaaagaaaaatgtctggactaggaaaatctaaatgactcaccttaaaaacgtatactgataaatgtttcacttttacaaaggcacaacaatctttgaactggcctgaggtgtagggaatcctaggtctgtacctgagttggttcatttccagttttctccattacacacactgagggtcatttttctgaagatttcctgtttagcccatctcatatacagtaactaaattaaaacatcactgtcattactagtgaaaaactttgaagtggctttttttttctatctagagaattaagtgaaaattctttgatctcatcatcaagaccccatagtgtgaactttgcaagacgacacccccgactcccgactccttacttctaggggtttctgtttagggcagattgctctcctttttgtcttttaatgtaatatgttcattcccaatttcctacttttgttgtaatattctgaccttccttctgaattattctaccccaggcatcaacaaacttctgtaaagggtcagataataagcattttcagctttgtgggctacatgctctctgttgcaactattagattctattctgctgttgtatgaaagcagcatagataacatgcaaacaaaggggtggggccggattagatttttagttcttgtagtttactgacctctgctttagcctcctgaatcttgctattcttgccatgaaaatcccaaactccatgaactccatgagaccatcccaacacatcctcttgtcaggtccctgaatgtgccaagacttccacatcattgccttgagagttgctgcccagtctcagtctggctagtgtgcttctctgactttcttttaaggggtttctttttctcagtttcctggtcttatgtcggaagctgaaccactactggaactgagggttcctttgtttgtttctctcttgttgtctttcctatagtattttctttaccctatcatgatacttaaatatatcacactagatcaaatcaaagacagtttaagagcttgggtcactaccatcccaagtccattattattagttctcagttcagcattctttcctcacttacatcagacccagagagacacagaaatagaatctccttggggttgccaaagattggcacagagatcaagtcagagatggaggtggggaaaaatttaggtaaagatttctctcttcctttcatcatctttcaattaaacaccaccaacaataaaacaaatatgaagtacacaagaaaatcctcgctaatctatttttgaaagaatgcttttcttctatgctttctcctgccacctgagagataaaatgattgaattaatgaatcagtatagaccaatagtaatcatggatgtgtttagtcagatctggcttctttgcaattctgggtttctagtaaaatattcaggcttattttcccattctgagttctcaaatttttatgtgacatcttgagtatttggactcaggtagtaacaaatgttatgtttgctgggtgagatgttcaatgtgagtagtcatggccgggaaaaccttacggttccatttttcctgttagcaagctctccagatattctatgagaacttacagaaagtaaatttcaatagagacatccacacccacgaggtttaaaaacatgaagcataaacatatgagagtcaatatgatttattcttcactttagctattagataaaatgtgaatatgaaattagcaaattaaattagattgatatctcatctggttagtaacatcatattaatagttcagttaagaccattaattatttttataccccatatgactagttcttgtttataagatggcctctaaggaaaggaaatgcagagccatccattaccagcaggcagagagtgtgtgactttttaagcacccagtggtgtctgtgggccacatgaacacttgattaggagttcaggtcatcattaaagtcacagagacaggatgtgctgtacaagaaggacagctgttatcgtaatagttagaacaaggcacaagaatccctcatctgacatcctcctgggtgttttctatcacaactcccacctgctgcctcacttcttatcatatcattacttagaaaaatgattgtaatgtgacttgaggtgaagccttttgaattttcattaaaataaaaaaaatcattataaaagaaaaaaacacattgtatattcagtgacacctctctcactttttcttgaaaaggacatgaataatttgggaaaaataaattcattatgtcatactgggatttccatattaaattatattgttttgaaaccatatggaactgccatttagacagtcaaaaagagttgaaaattagcaatttcatatggttcaacttaataagagctgttactcattgatcattgtttgtgtcagaaaatctatgaaaaaatccttatttccttattaatcttcataatcatcacaagtagtgatagtaaatctccatcagttcccatcttcctacctttgccaaagccgccccacatggaccttcttaggcaaatgaagtttcaagatctgtcctccatcccattccccgccctgcacttcctaccctagcccacacttagaattgcctctcctaaactctattttatggaaatatttgtgatggtactgcctaagacacaggcgttgttatcgcacacgcttaacagattgggaaatggaggcttagggaatcaggaaggaagacaattggagcagcaattaggtaggatttgaacccaggtcatcttggcttaaaattctgagcttcttcaacaattgccatagtatctctatgcttgatgactcaatcacctgatataaagcactgcgaaggtgacctaacacatttgggccaaattgctagaattaaccttattcatatagtcatgacagatcaatagaaatattactttgtccttgtccttatgtaatgtcaaagatcgatgaaacctcagaaatgacctgatggttcagtgtccctaggggaatttgctacaagtgaaatattccggaccccttctccaaagattccaaatctaagtcagggataagtccacaaagatttacttttctataaccacctcaggtgagcccagtgagaaacttcaggaaaatcttggataaatgttaacctagtccagttgccttattttatttatttttaaaaaatctttttcacttaatatttttttcttcaggtcagatgggtaatgtgcccattcgagggtggcacatctcacacacgtgcatgaacacccgatcatctatgctcatgaagtacaaaaggattgattgccttattttatagatgaagaaagtcacttgagatgtgaagctatttaacttactgctctgttggtaccattggtactaggactaaatttaggtctctgaactcataatcaagtggactgattcctaaactttaaccacagaccccagaaatgcaggtgtgtggtaagcgttattaaaggttaaataaataacatgagtcacacacacagtatttatcaacaagcacagcgatggccttttgattgaaagtggatctgttattaggcctccacttgccagctagcctagctcagctggggacaccagaagtcagttcaggcctaaaagtaatcaaactgaagactggttgaaacttctaatgaaatcttcaaacagaaccttccccagaagtctagtctagttgttccaaaccagactagtctgggttggaaataccaacttcaggtttttagagtaaacatgtaaacaatgtcctctgtagaaatggacctaaaagaagcctgatctttggacctcctaagggatgctatgtgtttggacaaggtcttggatttatccaatcaaatgcttacttgagtggttttgtagtaattccttgtatgtggtgaaaaggcggagtgaacaagaatctccagatcagagatatggggaggggacaggagagtataatgaattccctcctaatacacactagtaccatgtggatggcagctgtgagctccttgcacttggtgaaatggtcacctggtgtgtgatgcagtacctgcacctccatgcaagaccgtagacgtggggagcctctacttccatctgggagcatgctatattgcctctgtcaataactatctctataaattttaaagtttcggttcagatataacttttgcatcctttatctgtggctgttggtgtctttccatcaatcatgtcccatggccctgttgtgataaccatgcacccacagtcctcagttcatgtaagcatacacaatgaatagtaatgaagatgatgctttggacatgccacgtctatttctgcaagtctctataaatccaagtcaaggtcctaaggtgcctgcaggtgccccacagaattctcttctgaagccagttcttcagcctccatatctatttagtctttgtttcatccttctctgccctcttgatgttgttagtctatttaacaggcatctattatttaggcatctaagcctccattccatctggaaagctgtctacgcttttgtgaagacctggatgatccctgtccactgcccacagtcaagggtgaggggcggctcagcaggcatatccctgctcttacctgctgcctcccttccctgcttgttggttgattgtgctcagtgcccatcgaggtagggcttcagcatgccctgatgtccgcaattctctctcaaccaagacttcagcacaacacaaggagtgttttgttttgttttttgtttgtttgtttttgagatggagttttgctcttgatgcctaggctggagtgctatggcatgatctcagcttattgcaacttttgcctcccaggttcaagcaattctcctgcctcagcctcctgagtagctgggattacaggtgcctgccaccacgcctggctaattttttgtatttttagtagaaatggggtttcaccatgttggctaggctggtctcgagttcttgatctcaggtgatccacccgcttcagcctcccaaagtgctgggattgcaggcatgagccaccacgctcggccagcacgaggagttttgaggtatatttaaaaccagaaagaactaatacaggtgctcacagaatcaactgtaacatgattttatctaaaaatctgcccttttcaattccaacatttgattttcgggcaaatcagttatttcttacgaaattaaaaactgaattctcataggatttcagaaatgactctgatttcaaagtgcaaactgcttgaaagcctgaactaaccacttaacatgaactacatcccaaaactctaattcagaaatattatgttatctcctttgtaaaaatcttcctgtggtgtggtacttagcactggggtcacttctgaccaccaatatggagaaatgaaacattttttatgtgattatcttcttttactcatccttgctcttaaacgctgtttctctttgatgccctatgtttattttagatcattttccaagtcttttaatgttttctaatcctgcccctgccctccttatgtgactatctaaaactaagcaaaacaaagcccacctaattcatattaaaatgtattgcagaccaatgacttacccatatatcaaggaattattatagaataaaatatataaacataaagaactcagatcagatagtcttggatggattataaggcattattttgattttatgtggcctgacatgattattgtgagcactaatgatcatttttctaatattgggtgacaacatgattacttggttttgttgtatgcatcgtaaacagatcctttaaaaagcaaaaccttgcactgacaaagtgaattagacagtttgtaagtatgaaaataaagaaacatttatatagcttaaaatatccctagtaaagagcctatttctgagagaagggtaaaaatttttgagaacagaattctttgaaaaacataatcgtgctagggaggaaagatgccagattctctggaatttttgaactcagatataaactgactgatctaaatatagggagttactttgtaaattgaaaacgcattaggacattttacccccactcccatgggaatgccttgtctggaatagatgtgcatagggccatattttgtttggtttgaaaggagcgtgaagattgaagggcattttggtcctgctttgattattgtaatgccaacacacttttgtttgatgcaagcctggtgactcctggcgagaagggaattatgcttgtggaacgagagattttctggatgaagaaaagaacacgacagtctcagttttctgtcacattctgaattaaatgtaaaaatacatgtttgtccttcctagaatgctgcatcaactctaggtgatttagatacagtttagagaagacccttcaaatgccaatgaccttccagaatgcattacatcttaatttagagtaacactagcagacatggagaaaaattagttgggtttacaaaatagccaaaccaggttactgggatcctgaggggcaacaaaaagccctggctttgccttcatcttagtttacacaacacattccagtttcatggatctataaataccatttgactttctcaaataataaattagcggctcccaagaggaaatgaaaataaaaaaagtcaagtgattcttttgcctcagcctcctgagtagctgggattacaggcatatgccaccacaccgggctaattttgtatttttagtagagatggggtttctccatgttggacaggctggcctcgaactcctgacctcgggtgatccacccgtctcagcctcccaaagtgatgggattacaggtatgagtcactgcgcttagcctgaaaattaaaagattttgaagcttctcatggagaaagaattataaaagttcaaagctagaaggggaaaaaagaaacaatacatcgattagatgcaactagcacagatcagaaccaattcttgtttaattctcccaccaccctccagcttcatgttgctatcctcctctggccaatgaacctgaaggtcagagtagatttccaaaagtcgcagagctattaagcattccagacgacccttcattttctactacctctatctgataggacacagaattaagagaaactcccagggcagggtcaaatatttccaccaggactgccgagagccttggtttcctctaaaacaaatacactggcttttcacagccaaacagaccttgtattcagggctaagagatgagttctaagtatctgtgtggtcccaagcataccgttttctgggtggcccactcaacatgacagagcctccagtgaagtttctctcctttaattaatttcattagttttgtctggtagtctagttctaccctgtggactatttatggggtcctggttcctgtctaactctttcccctatctcatcccccagggacccagggcctttgctttgctaattctcaaccacccccacatttccactgaagagctcagaatatcttgagcccttgtctgagaacctcaaatatctgaatgtcttctcctccaatctctgtcatttagtccactatgcctgaaaacttcttaattcctttcagaaagtaagaccatgcatgtttgaagactctgacctttagaaattgcatccttatatcaaacccaaatccttcttcctgtggctattacctaagtcatcctggttcttaaattgactttttttttctttttctgaaggctcacagcaagtaggtgaccaagttaagcgccatttcttacagcaaatgaaaaatatctggaattgattcaagttcctaggctcaagatgacattcattcatttacgcaaaatacatttttttgagtgactaatagtacccactgtccacatcagtgggcaaaagccatgagaaataagtctgatctctcttccctaggaaaaaacctttaaatcgtcaaagaagacagttatcttttgaccactgagtcatctccaggcttacaggcttcatgtatctagttctttctgtctgtggtatgacctcttcttttagaggaggtctcattagaatataagtaccaaaaagctatggactacattgtgttcctctttacatacactgtggctagcaaattgttaatgcttaatacgtagctttaaaaataatatgaatacatcatgattatttctggaactcttctaatctgagctgaaatttgaactgagtctcttttagctagaatttacaaacttacttcctgaatgaaatggaatcagtgaaatagaaatcattttacattgaaagggaaaagattgatcataacgtgatgttttaagcaaacaacaacaaaattagaacataaatggtctaatcaggtcagaagtaggcattacaagaaaaagtaagcttacaactgcaggcaaatcagagattctggaacacataggtattaggctgattttgcattgctataaagaaatacctgagcctgggtaatttataagaaaagaggtttaattggcccacagttttgcaggctttacaagaagcatggcactggcatctgctcagcttctagggaggcctcaggaagcttacaatcatggcagaaggtgaagggggagcaggcacctcatacggcgaaagcaggagcaagagagagaagtgggggcgtgccacacactgtcacatgaccaggtctcacgagaactcactattgtgaggacagcaccaaggggatggcgttaaactattcgtaagaaattaactcccacgatccaatcacctgccaccgggccccacctccaatactggggatgacaattcaacatgagatttgggtaggaaccaatacacaaactgtatcaatatctaaaataatcaatgaatccaggagctggttttttgaaaagatcaacaaaattggtagactgctaccaagactaataaagaagaaaagagagaagaatcaaatagacgcaataaaaaatgataaaggggatatcatcacccatcccacagaaatacaaactaccatcagagaatactataaacacctctaggcaaataaactagaaaatctggaagaaatgaataaattcctcaacacatacaccctcccaagactaaaccaggaagaagttgaatctctgaatagaccaacaacaggctctgaaattgaggccataattaatagcctaccaaccaaaaaaagtccaggaccagatggattcacaaccaaattctaccagaggtacaaggaggagctggtaccattccttctgaaactattccaatcaatacaaaaagagggaatcctccctaactcattttatgaggccagcctcatcctgatgccaaagcctggcagagacacaacaaaaagaattttagaccaatatccctgatgaacattgatgcaaaaatcctcaataaaatactggcaaaccgaatccagcagcacatcaaaaagcttatccaccatgatcaagtgggcttcatccctgggatgcaaggctgcttcaacatacgaaaatcaataaatgtaatccagcatataaatagaaccaacaacaaaaaccacatgattatctcaatagatgcagaaaaggcctttggcaaaattcaacagcccttcatgctaaaaactctcaataaattaggtattgatgggatatatctcaaaataataagagctatctatgacaaacccacagccaatgtcatactgagtgggcaaaaactggaagcattccctttaaaaactggcacaagacagggatgccctctctcaccactcctattcaacatagtgttggaagttctggccagggcaattaggcaggagaaggaaataaagggtattcaattaggaaaagaggaagtcaaattgtccctgtttgcagatgacatgattgtatatctagaaaatcccatcgtctcagcccaaaatctccttaagctgatcagcaacttcagcaaagtctcaggacacaaaatcaatgtacaaaaattacaagcattcttatacaccaataacagacaaacagagagccaaatcatgagtgaactcccattcacaattgcttcaaacagaataaaatacttaggaatccaacttacaagggacgggaaggacctcttcaaggagcactacaaaccactgctcaatgaaataaaagagggtacaaacaaatggaagaacattccatgctcatgggtaggaagaatcaatagcgtgaaaatgaccatactgcccaaggtaatttatagattcaatgccatccccatcaagttaccaatgactttcttcacagaattggaaaaaactactttaaagttcatatggaaccaaaaaagagcccacattgccaagtcaatccaaagccaaaagaacaaagctggaggcatcacgctacctgacttcaaactatactacaaggctacagtaaccaaaacagcatggtactggtaccaaaacagagatatagaccaatggaacagaacagagccctcagaaatcatgccacatatctacaactatctgatctttgagaaatctgacaaaaacaagcaatggggaaaggagtccctgtttaataaatgattctgggaaaactggctagccatacgtagaaagctgaaactggatcccttccttacaccttatacaaaaattaattcaagatggattaaagatttaaatgttagacctaaaaccatcaaaacccttgaagaaaacctaggcaataccattcaggacataggcatgggcaaggacttcatgtctaaaacaccaaaagcaatggcaacaaaagccaaaattgacaaatgggatctcattaaactaaagagcttctgcacagcaaaagaaactaccaccagagtgaacaggcaacctacagaatgggagaaaatttttgcaatctactcacctaacaaagggctcatatctagaatctacaatgaactcaaacaaatttacaagaaaaaaacaaagaaccccatcaaaaagtgggcgaaggacatgaacagacacttctcaaaagaagacatttatgcagccaaaacacacatgaaaaaatgctcatcatcactggccatcagagaaatgcaaatcaaaaccacaataagataccatctcacaccagttagaaaggtgatcattaaaaagtcaggaaacaaacaggtgctggagaggatgtggagaaataggaacactttgacactgttggtgggaccgtaaactagtccacattgtggaagtcagtgtggcgattcctcagggatctagaactagaaataccatttgacccagccattccattactgcgtatatacccaaaggattataaaacatgctgctataaagacacatgcacatgtatgtttatagcggcactattcacaatagcaaagacttggaaccaagtgaaatgtccaacaatgatagactggattaagaaaatgtggcacacatacaccatggaatactatgcgccataaaaaatgatgagttcacgtactttgtagggacatggatgaagctggaaaccatcattctcagcaaactatcgcaaggacaaaaaaaccaaacaccgcatattctcactcataggtgggaattgaacaatgagaacacatggacacaggaaggggaacatcacacactggggtctgttttgtggtcgggggagcggagcggggagggatagcattaggagatatacctaatgttaaatgatgaatcactgggtgcagcacaccagactggcacatgtatacatatgtaactaacctgcacgttgtgtacatgtaccctaaaactaaagtataattaaaaaaaaaagaattaaggatatcaggagctttaggtttatttattcaaatgaagaatttcccagaaggtgatttgattcttagcagcagcatagcttaaagctctcaccagcagaacccaccattttcctatggatatttttcaaatatgtatttaggtttttttgggttttttttttgggaaacggagtctctctctgtcgcccaggctggagtgcagtggcgtgatcttggcttactgcaagctctgcctcccaggttcacaccattctcctgcctcagcctcccaagtacacatttaggtttttacctttgaactcctagtactttgtgccaatgccaattagttgtgaatttactcttgtactatcctctggcatctcttaaactatcatttcctttgtgatattttacttttcttgcatgtattctttgtttctttaagcagagtaaagtcattttttgtaagaagtgcaatgtctttcacttctttatgtatctcatgaagtctgtaagaatgctattctactaatcagaccgggcaaacatgctgtgacacatagactcaccgatacgtaatggctgaaatgtaacagaagtttagatcttactcacttaaccaaggctggcattcttgttcctgttcatgaacagctttttgccacgtggagactcagagccagctcctctcaatgtgtggttcttcctatcttaggattttgttgttttctacatcgagcttggagaagctggaagagcctgaagagccaactggtccttttttttttttcttttttttgagatggaatcttgcaatctcagctcactgcaacctccgcctcccgggttcaaatgattctcctgccttagcctcccaagtagctgcgattacagatgcccgccaccatgcccagctaatttttgtatttttagtagagacagggttttaccatgttggccaggctggtcttgaactcctgacctcatgatccacctgcctcagcctcccaaagttctgggattacaggtgtgagccactgtgcctgacccatggtcctagtcttaagacttcgcttacaaatgcaaacattatttccagtcagtgttattggagagatgagtcatatggtcacactaggggcataggagactggggatgtgatatagtcctatcctgggcaaccatttcctagacacagatttataccctgaaatacaaaactggattctgatggacagctagctttctctgctaagcacaaagtcgagtttaacaaatatttgttgatctatttatattagcagtaaagatcaaattgcttttatttctcctttgaacagtgctattaaatatctcggaaattttagaaaactctgtaatgatgtgcagtagattatgcatttcttcaacaatgatttgaaagattgctgatgtttatctagggagatgtgaagcaatttaatattattaattactaacaaacggataagatttacaagaattgtcaaagcttaaagctccaaataatcatttctcacacaagaaaatttattatgccattatgcttatttctatcagcattcctaaagtgcgatcactgtttgctattaaatttttattgcacatttaatttatctttccctctagtggggaaacatactagagaattcatttgacactagtatcatctccccttcttttttttctcaccacttctgcaccccctgaaatagataggaatatatttgtatcttggtattaagtatacaagagctgaagagaacaatgcctactgctgccggaagggaattacccagcctgaattagctttatgaagaaccaagtggacttctgttataaatacccactttcggtggttgataaagaattctgggaaaaaatccatttataagctaaagcttggttttcagcgattaaaacagaaagcaattttggttttcaagtattaaaggcagactgcgtgttaaaagttggggttggggggctatttagtttataaagtgctgtattgaaaatgacgttttatgtttctgaaggtatgcgttttatgtgcaaagcttgacaaacttgttccccatcccactccctaccctaagagttgaatcaggaggaaaacagtgatataggatctgaaaacgcgtttgttgtcaccaaggcctttctcttaacagggccagattcagtggaaacacgatcagccctgatacagtggaagccttctcttgattttcagaaagatttctagctcttgggcctaattcactaagacagaagtcagattgtgttattgattaatctgaagctttagtctctcacaggatttgataacacaccgcaactgttttcttcacactgaacaactaccaacgttttgtttgtattttgggtaagaggctgaacttgacaaaatatcaatgatcccatttctagtgcctcagtgaggctatatttttttcctttgacttaacagtgcggcctgaacatctggtctactgaactcaggagggagtgcatagaagtcttacctctcccgggaagaatctgcgaatccttcaaagagttgtcattacaacttcaatacacccttattgtctactcctctaagagcacttttcccctccatcccaccctatgtatttcatctacatatttgccaatgactatgtttgtctgtttccttacagacattgacacgaatgccctgaaagacaatgaaattcatgctccagaagaagtaggatttagagctgacatttacagagtttccacagtggatagtagatcaatcagggctttaggtgttgctgagtaatttttccaactttctgttgctacctggctgtaacagccagaagaggaagagtgacagccccaccaaaattgagctgccttccttactcaccttctgacatcaccgtcctggaacctcatgcattaccctcagccttggcacattatctgcctggcttctgcattggccatggcatactcatgcagccatacgctctaaagtctcctgtcagcctcggaaccaccagtggggcaagctctcccttccattactgattgctatagtattaatagaatgcccgggctcctggcatccctggcctaagggactatacctctctccacgacccggtgcttagtaggtgctcaataaatgttgtctccatgttgtttagcacttggattgatctgttccaaaggcgccagccccttcccttgaactgatttccaagtttcctccgctgtgtgagaattaacaatagcaatgccatttttctaccttggtgactgtgtttcctacctcggtgacagtgttcccaaaaacaaagcaaaggtcaacctcactcatacctttaacagagcataagaaccctgaccacaacaaagcctgactggccctgactgcatccctccccagccccttatggttccaacctgccagcgcttccccaacccctcccctatagaaactggattataaaaacctcagcttacaggcaatcaggatctcagccagattcctggctgggaactctcacaggcttattcttgtaaatacacctatttggccattgagttgccttgtctctcatttccttcctttaaaaatctccctaacactctgagatttttcaagacagacagacacacaaacacacacacacacaccccacatcggtcttaaaacttcccactggttataaataactgcagtgtattcggactagttcaaagtaaaggcgatgatagggaaggaggtgattggtttaagaggagaagcagccacacaaaggggcaggaagtggtgcatccgtagcggagactactctctccatcattcatggggcctgggaactcccttctcaggctttctcaacacatttgtttcttttcttctctgaagaccaactctctctctcaagcacaccctctctgcttctcaattaatctaacttgcaagtaactttggtttgtgtaatactgcctgaagcctcgactctatacatgaatgtatggctcaaatacacttcatcaactgtgttcagtttttatgtccttttgttcaaatggttaaattcaggcaatgccgcaaatctgtcacatgccaactgacagtcttctgtattgaggaccagttaaaattcattgatattatgaaactagtactgtcatttactaggaataggtgatttactttattatttatttatttattattaaatttaaatcatgaatagttccattagtttaaaatttataaaataaaaataataagcacagaaagcaggaaagatttttaccaatgttttcaagtggaaacaaaataaaagaattttttttctgtttttcatgtttctgaacaattttcctgggtaaaatgtaatttatattctgaatttaaattagctatacaatttgtataatagaaaatgtttttctcttcttttctaaataaatgtagaataaatatttaaggaatattgattggaaaggccattgaatgacaactgttctcagagtgcctgcatctcttatgctggccacggctcccttgaccctcagagcaagttctgccaccacattatctccaaaagctgtgttcaggaatttgtccagcttcccaggtaagggcatttaacctcggctgcactggactgctggctgcgtctgtcccctggtcaagggaagccttggatggaagagcggctgtcacaaagaggggcaggacaggcatcggaagcagcatttgtctttgcctctttgtctctctgccaggatgataactggcaaccacgtagccacagaggacaagagacccctgcatctgagcagaggctgatcctttactaggctgttttgctttttaatgtgatttcctcccagcaagccacttccctgcagtcatgtaatgccattctgatttggtttggcagcgttaatctaaggaacatgtttaatagctcaggcatggttatttgcatgaattttttttttttttctgatagccgctgttcctttttaacactggggtccttgaggctgccaaggccttgctttagcctggagcccagatttctccatggagctgctctgtgtctgccgttgctactcaccctgtattgagcacttggaggtgttctaattcaggacaactgtctgctgtcagtgaggaattagtgcatgtggcccgacagtggaaggcagcagcacctctaggcaagctgttttccttgctaactcattgtatgcctgtgggtcagattccttcagtccccagggcagtgattctccaggcgggacctgtctcagtgtctaagtgatggattgcattgtttgaaaattcgtggccgaagctgctgtcagatgtactgagagcaactgtcattgtggagggagagtgagcaaagggctcaccttagaagctgtacgctttcctttccagattttgtgtcacttgctattagcatcaatagcccatgtccatagaacctctgcctctcttgacttccctgattctgtccaaggctttccaagcagcagttcatacacgcagtcttgctgccctctttaattttcccctttccacagacttagtacccatagtcaccctcaatttcttctgtacagcactactctctgtacagcgttcccttccttagctagagtcttcatcccacccagcaagcactgaaatctaacagtggggagccaggaagaggacatttttatgcaaataagtaaatatctacacttcatttacagtgtgactctgaaataaagtctttttacctaaaggaagagagtcaaactattttcacaactagtcctgcattgatttctctgatgatttgcatgggggtttctcggagcactgctactgggtacagaagttcttatcacttgtaattcctcaaaacatgaagcatgccgatgagaaattcggtataggagaataaaataaaacagacaacaaagagaggatcattaaaatgcaaatcccagctgctctacagggttcattttgtctcatcttctctgtgaaaccttcatctactgctctagctccatacaccgatagggtcctctttaatgtctacagatcctacaactgttctgtgaaatatgtgactaaaatttgtacagtggtaggtcagtttctgggtctttaaaaactgccagctttttctctaaattgggatgaaaaccaaactctaaagtatttaaagaggcttattctgagccagtatgagtgaccatgacccaagaaagagtctcaagccatcctgagaaagttgcctaaggtggtcgggttacactttggttttatataatttagggagacagaaattgtaggtaaaatcataaatcaatatgcagaagctatatattggttcagcctgaagaggagggatatcttgaaggggcggatgtgaggtcattaagtggattcaaagattttctgattggcagttgttgcaagagttaagctttgtctaaagacttgaaatcagtaggaagaaatgttttaattaagataaaagagggtgtcaaggccaaggttcttgttctgaagcctccagttagcagccttcggagagaatagatggtaaatgtctctttttagaacttaaatgtgtcaaactctcatttaatttctcctagctctgggaaaggtccggaaagggaaattctggctgcattaatggagattctctacagatccaaatttcctcctaaaaagatcactttgaagagcgatttcaagatatgtcaaagaatatattttggagtaaaatattttgatttcctttagggtctgctgtctgtcacatgatgctatactaaagtcatgatggaatttggtattgtatttctacaaagagtctatgtggtcagtcttatgatctctgttttaacgttaatgctggtcagttgtacctaaactccaaacagaggggctataatgaggcgtgtccaacctcccctcgctgtcatggctggaaatttagttttttcaagtttctcttgggtccccttggccaagggttcattcagtcatttggggggcttcagattttatttttgctttatagggtgtcagggcctttggggtgaaggccatgtcttatctggaaaatgcctaaaaatggagtagattgggccttgagcagtttttcagaggttcagttacaaactctaaagcaagcatgagaaaaagcacattattggagtaagtatgattgatgttgttatgaagagtattattgatttattcgcatctccaaatcattctagaaagagaattgagacagcttatcttatctatctttctatctgtatgcatacaatgggataaattgacaaaataaacgtgaggaaatggcagcaacgggaaaatgaaatcaggaaaataggataaatagagaggtttgataacacataatgaacaccgtaagacactattcaactgctggagaggagccccaaatttggttgtaaatttaccagcagccacaacaaaggggaaacacaatctgttgcaaaaattatggggcctgtaaaatgaaaactcagctaaggcaggaaaacctgttctttctggttcggtgagtccagtgacccaagactcacagactcatgattcctgagaagaggcactgacctggtgctgtgcacaatgtcattgcccacatttttaaaaagagccaaggttctcatagcatcccccaaagcaggctagtggcatgcacttcaacagatgtagttcaatgagattcaaaactgtacatcatgcagtagtatttctcttgaactgagagtgcagaagtgctatgttgtttgtatatcagtgttgcaggactttctccttaattcagctaaaaacagggtccttgtcacctgaccatgaagattaggcttgaagacacgttgaagggtgagaagggcagggtttattgggtgaaaaggataaaaaagggaaacagggattctcagcaaaacgagagtcctgattgaatcccagggaccacctcagaatgggaggggccaggctcctccccatttgcaaacagcagaaacttctggaggttccacccctgtgtgcactcctctcagtgtgtaggctggttggaagttcttccaggaagcccttgttacttggctgtctcatcagtaagcactggtaatccatccagtgaaagcagttttgacaaactgtcactaaacttacagatgtgtacctcagaagaagataataaaatctctctgaaagaggaaatctgaatatgtaaatacataggtaggaaaaatagctcatttgaaatcgtaaatattgtaaatatgtaggtaggaaaaatagctcatttgaaacaactaaaaagtgattataatataaagattcatgaccacatctttcatactagcaaatgagaaaaacaggatcacattttatctgtaactgcatatctaaaatctcaaaggaaagaataaagaggagaaaatgcttgcaggtgtctgtgaatccacatctaggaaattaggttaggagttgtatttgttttgtgttgataatatcttggtagtggtagtgctgggtggctctcccacctctcagaatgcaggtgtggtaggggctgggaaaggggcacaacatggagaatgttcatgaaccagagtgggctaagggaaatagggtatttgctaaagagaagggggaataagcctgatgacaggagagagggagagaaggagagtggggaaaaaggaggaagagaaggagagtggggaaaaaggaggaagagaacagacaaaaagaacgagaaagtcatggacgactgagaatacagagagaaagcagggaagaaaaaagacatttctgaaccttaaacagtaattaccaacttgacttaatggcagaaagcagttgagaataagaggcttccttttcagagaacaggagttgaagagaaatgagaggacttttccctttctcttcttagtcagtcttctttctgccttacaggttttttctgtgcccagaaacagtcctccagcagaagagcaggagacaagagttagtgtcccagaaaatgaagctgaggcccagaaaagatagatgacccatggccttataaggtctaataaagactaggtttcctttcatgatcggtgtggctccactgtaggcttttacgtaggtgagcactagaattagatttttatttcagaaatatccctttggaagtattatggagggttgatcagagaaggcagttgccttaattctgcctccagattgttggtgatgagccctctgatttctggtgtttcatgctactctaaagtggttagcactctcagtctgtccacaatttctccaagaatggtcttatacaaggtacaatgttcacagtgacagacgtcaaagagcaacgtgccaggctactttctctaatatacttctgacatctcatttttattgagttattctctccttgaagactttcactcctcattccctgtaggagatggctaactcgttggcccgctctccatggccttctccctctggtgtcatctgtacttgaagaatttcccatctatctttctctgactctcctctctgttcaaattaatctacttatttcctaaacaggcttgttttatcattgttcttttctcttcttgaaaggggctctccactcctcttttctgagccaaacactacctaaactttaaggtccacataaaatgtttcatgtctaaggaggcaaaacatattaaggtctggtccctgggttcaatctcatgcttgctgcttgccagctagtagtacaatgtcacaaccagaatattgaccctgatgtagtcaaaatacagaatactttcatcattgcaaggatcccttctgttaccattttatagccatatctatttccctcccaccctaactctatcctgggatctctggcaaccactaatctgttcttcatgtctgtaattttgtggttccaagaatgttatataaatgaaagtatacagtatgtaacattgtggggttagctcttttcactcagcataagcttctggagattcatctagattgttattatgtcaggagttcattcattcctttttattgccaaatatgtattgcatggtatggatgcaccacagtttgcttaacctttgacccattaaaagacatttgtttccagtttagctgttaaaaataaactactgtgaacatttgtgtacaggttttcacatgaacctatgtcttcatatctttgagataagtactacccaagcgtgtaactgctgggttgtttagtagcctgctttgttgttgttgttgttgtttagaaactgccaaactcatttccacagtagctatatgctttcattttatttttattttttattatacttcaagttctgggatacatgtgcagaacgtgcagaacgtgcaggtttgttacatagttatacacgtgccatggtgttttgctgcactcataaacctgtcatctacattacttatttctcccaatgctacccctcccctatcccgccaccctccgacaggcccaataagccctggtgtgtgatgttctcctcctggtgtccatgtgttcttgttgttcaactcccacttatgagtgagaacatgcggtgtttggttttctgttcctgtgttaatttgctgagaatgatggtgtccagcttcatccatgtccctgcaaaggacatgaactcatgctttttcatggctgcatagtattccatggcgtatatgtgctacattttctttatccagtctatcattgatgggcatttgggttggttccaagtctttgctattgtgaagtgctgtaacaaacattcttgtgtgtttgtctttataatcctttgggtttataaaatgatttataatcctttgggtatatacccagtaatgggattgctgggtcaaatgatatttctggttctagatccttgaggaattgccacagtgtcttctacaataggtgagctaatttacactcccaccaacagtgtaaaagcatttctattttttcacaccctctccagcatctgttgtttcctgactttttaatgattgccattctaactggcatgaggctgtgaattcatctggtccttgttttttttggttggtaggctgttaattactgccttggtttcagaacttgttattggtgtattcaggaattcaaattcatactggtttggtcttgggagggtgtatgtgtccaggaatttatccatttcttctagattttctagtttatttgcatagaggtgtttatagtattgtttgatggtagtttgtatttctgtgggatcagtgttgatatcccctttatcattttttattgtgtctatttgattcttctctgttttcttctttattagtctagctaggggtctatgtatttggttaatcttttcaaaaaaccagctcctggattcattgattttttgaagggttttttgtgtccctatctctttcagttctgctctgatcttagctatttcttgtctcctgctagcttttgaattagtttgctcttgcttctctattttttttttattgtgatgttagggtgttgattttagatctttcccactttcccctgtgggcattttagtgctataaatttccctctaaacactgctttagctgtgtcccagagattctggtatgttgtgtctttgttctcattggtttcaaataacttatttatttctgcctttatttcgttatgtacccagtagtcattcaggagcaggttgttcactttccatgtagttgtgtggttttgagtgagtttcttaatcctgagttctaatttgattgcactgtggtctgagagactgtttgttatgatttcctttcttttgcatttgctgaggactgttttacttccaaattatgtggtcaattttagaataagtgtgatgtggtgctgagaagagtgtatattctgttgatttggggtggagatttctatagatgtctattaggtctgcttggtccagagctgagtaaaagtcctgaatatcctgttaattttctcattgatctgtctaatattgacagtggggtgttaaagtttctcgctattattgtttgggagtctaagtctctttgtaggtctctaagaacttgctttatgaatctgggtgctcctgtattgggtgcatatatatttagaataatttgctcttcttgttgcattaatcactttaccattatgtgatgcccctctttgtctttttggatcttttttggtttaaagtctgttttatcagagactaggattgcaacccctgctttttttttttttttttttttttgctgtccgtttgctttgtaaatcttcctccgtcccttgattttgagcctatgtttgtctttgcatgtgagatgggtttcctgaatatagcacaccgatgcgtcatgactctttatccaatttgccagtctgtgtcttttaattggggcatttagcctgtttacatttaaggttaatattgttatatgtgaatttgaatctgtcgttatgttgctagctggttattttgctcgttagttatgcagtttcttcatagtgtcaatggtctttataatttggtatgtttttgtagtggctggtacagagtttttctttccatatttagtccttccttcaggagctcttgtaaggcaggcctggtggtgacaaaatcagcatttgcttgtctataaaggattttatttctccttcacttatgaagcttagtttgggagggtatgaaattctagattgaaaattcttttctttaagaatgttgaatattggcccccattctcttttggcttgtagagtttctgcagagagatctgctgttagtctgatggacttccctttgtggataacctgacctttctctctggctgcccttaacattttttctttcatttcaaccttggtgaatctgacagttgtgtgtcttggggttgctcttctcgaggagtatctttgtggtgttctctatatttcctgaatttgagtgttggcctgtcttgctaggttggagaagttctcccggataatatcctgaagagtgttttccaatttgtttccattctccccgtcactttcagttataccagtcaaatgtcagtttggtcttttcacatagtaccatatttttggaggctttgttcatttcttttcattcttttttctctaatcttgtcttcatgttttatttcgttaagttgatcttcaatctctgatatcctttcttctgcttgatcgatttggctatttatacttgtgtatgcttcacgaagtcctcctgctgtgtttttcagctccatcaggtcatttatgttcttctctaaactggttattatagtcagtaattcctctcaccttttatcaaggttgttagcttccttgcattgggttagaacatgctcctttaactcagagttgtttgttattacccaccttctgaaacctacttctgtcaatttgtcaaactccttctctgtccagttttgttcccttgctgacgaggagttgtgatcctttggaggagaagaggtgttctagtttttggaattttcagcttttttatgctggtttttccttatctttgtggttttatctacctttggtctttgatgctggtgacctttggatggggtttttgtgtggacgtgctattcctttctgtttgttagttttccttctaacagtcaggcccctcttctgcaggtctgctgcaatttgctggaggtccacttcagaccctgtctgcctgggtatcaccagcggaggctgcagaacagcaaagattgccgccttttccttactctggaagctttgtcccagaagggcacctgctagatgtcagctgaagctttcctgtatgaggtgtctattgtctcctgttgggaggtgtctcccagtcaggaggcatgtggttcaggggcctacttgaggagcagtctgtcccttagcagagcttgagcgctgtgcagggagacctgctgccgtcttcagggctggcaggcaggaaggtttaagtctgctgaagctgcacccactgctggcccatcccccaggtgctctattccagggaaatggaagttttatctataagcccttgactggggctgctgcctttctttcagagatgccctgcctaaagaggaggaatctagagaggcagtctggctacagaggctttgccaaactgttgtgggctccacccagttcgaacttcccggtggctttatttacactgtgaggcgaaaattgcctattcaagcctcagttaaggcagacaccgcttccccaccaagctcgagcgtcccaggttgacttcagactgctgtgctggcaatccctattttggtagggattgcagtagatcttagcttgctgggctctatgggggtgggatccactgagctagacttggctccctggcttcagccccctttccagggagtgaatggttctgtctcactggcattccaggtgccactggggtataaaaaagaaaactcctgcagctagctcagtatctgcccaaatggcctcccagttttgtgcctgaaacccagggccctggtggtgtaggcacgcaagggaatctcctggtctgggggttgtgaagactgtggaaaaagcgcgatatctgggctggaaatgcagtattcttcatgacacagtccctcatggcttcccttggcgaggggagggagttcccgaccccttgtgcttcctgggtgaggtgatgccccaccctgctttggcttgccttccttgggctgcacccactgtctaaccagtcccactgagaggagcctggcacctcagctggaaatgcagaaatcaaccaccttctgcactgatcttgctgggagccgcggactggagctgttctattgccactgctatacccttttatatttccaccaacaatatattagtgatcccttttctccacatcctcactagcatttggtgttctcactgttttttattttagccattctgatagtgatagagtgagatctcattttggttttaatttgcactcagcaaatggctaatgatgttgaacgtgttatcatgtgcttattttccatctgtatatcctgtgtgttgagatgcctctttataactttagcccattttctaacagaattgttttcttttttttttgtcaagtgttgagaatactttatatattcgattcgtttgtcaggtacgtggtttggaagcattttctcccactctagtttttcttttcgtcctctggacaggatatttcacagagcaaaagttttttttttttcttttttcctttttctgaagtctaatttatcaagcctttcttttatggattgtccctttggtgtcaagtctaataactagccctagatcccaaagattctgaagtttttcttacatgttttaaaacaagttttatagttttgcattttatatttaagttcatgattccttttgaattagtttttatacaagatttgaggcttaagttgaggctctctctttgttttctttgttgttgttgtttggttttgttttggatctctaattattttagcagtttgtttaaaaatctatctttcctccattaaattgcttttggaccattttcaaaaatcagttgggcatatttgtgtggatctatttctgagctctctattctgttctatcgatatgtgtgtctattccttcatcaataccatatgctattgattactagaactatatatggtaacttgcaatcaagtagactattgccatgctattttttttgctttcaaaattgtttttaagctaatctagtttttttgccatttcatataaattttggaataatcttgtttatgtctataaaaatattgggattttgacaagaattgtgttaagcctgtaaatcaatttgtggagaactgacatctttagtttgttgaggctttcaatccataaacatgtttcttcatttatttagatctttgatttctgtcagtagtactgtgaagttcttagcctacaattcttacacatgttagatttacatctaaatatagttattcctttttcaatgattataaattgtattgtcttttaaattttgttttgcacgtgtttattattactgtatagaaatgcaattgacccttgtgtgttgatcttgtatcttgtgactttgctgaactcatttattaatttcaggagttcttttggggcacatttcttaggattttctaggtaagcaattatgtcatctgcaaaaatgcagttttacctctttgtttccaatttgcatgcattttatttctttccttgccttattgttctgggcagaacattcagcactactttgaataagactggcaaaagtgtacatctttgtcttgttcccagcctaagggagaaggaattcactctttcaccattatgcacaacgttatttgtacgtttttagagatgcgctttatcatgttcagaaagttctcttccatttgtttttttctttttaaaaaatcagtgggtgttgaattttgtcaaatactttttctgtatcaattgatccaatcgtgattttttttttctgttggaatggagcgttatactaacagattttcgaattatccattattccacaaatatacaaactatccatgattcccccagttttgttcattttgcttaggatagctgtggttactttgggtcttttgtggttctatataagttttaggatttttttccccatttcagtgagaaatgtcattggtattttgatagggattgcattgaatctgcacattgcttcgggtagtatggacactttaacaatattgattcttccaatttatgaacatggaatatctttctattttttgtgtgtcctgttcaatttctttcatcattgttgatagttttcactgtagagatgttttacttctttggtttattcctaggtatttaattttatttgtgactattgtactgggattactttttaaaatttctttttcagattgttcattgttggcatatagaaatgctactaatttttaccattttttatttttttgagacagagtctcactctgtcacccaggctagagtgcagtggcatgatctaagctcactgtaacctccatctcctaggttcatatgattcttgtgcctcagcctactgagtagctgggattacagacatatgccaccacacccagttaatttttgtatttttagtagatatggggtttcactatgttgactaggctagtcttgaactcctggcctcaagtgatctgcccacctcagcctccccaagtgttgggattacaggcgtgggattacctggcactactgatttttgtatgtcgattttgtatcctgcaactttactgaatttatcagttctaatagttttttggtggagtctttaggtttttttccaaatataagatcatattatttgcaaacaagtataatttgacttcttcctttccaattcggatgcccttcatttctttctcttgtctaattgctctagctaggacatccagtattacgttgaagaacagtggttaaagtgggcatctttgtcatgttccagatctgaggagaggctttcagtttttcctccttcagtatcatactaactgtgggtttgttgtacatggcttttattatgttatgttccttctatacccagtttttttttgagagtttttatcctgaagggaagctgagctttatcaaatgtttttcaacatcaattgaaatgatcatatggttattattcttgattctgtttttatgatatatcatattgattgagttgtgtatgttgaatcatccttgcttcacagggataaggcccacttggtcgtgatgaataatctttttaatgtgttgttgaatttggtttgctattattttgttgaggatttttgcataaatattaatcagagatattggcctgtagttttctttctttggtgtttctttgtctggttttggtatcagggaaatactggccctatacaatgagtttggaaatatttccacctcagttttttggaaaagtttgagtagaattggtattagttcttctttaagtcttagtagaattcagtagtgaagccattaggtcccaggcttttctttactaggagactctttattatggcttcaatctcattgcttgttattggtctgttcaggttttggatttcttcctggttcaatcttggtaggttgtatgtgtctaggaatttatccatttcttctatttttttccaatttgttggcatatagttgctcatagtagccactaatgagcctttgaatttctgcagtatcagttgtaatgtctcttttttcatatctggtttcttttaaaatttgggtcttctctcattttttcttggtctaagggtttggcaattctgtgtatctttcaaaaaaacaactttttgagtcactgatcttttatattgttttctttatttcaaattcatttatttcttttctgatctttattatttcttttcttctaattttgggttcagtttactcttgcttttctaattctttaagatgcattattaggttatttatttacttttttttctctttttcttttttctttttttttttttttttgagatggagtctcgctctgtcacccaggctggagtgtagtggcgcgatctcagctcactgcctcctgagttcaagccattctcctgcctcagcctcctgagtagctgggactacaggcccctgcaaccactcccggctaattttttttgtattttcagtagagacggggtttcaccatgttagccaggatagtcttgatctcctgacctcgtgatccacccgcctcggcctcccaaagtgctgggattacaggcatgagccactgtgcccggccttttcttttcttttcttttcttttcttttcttttctgatgcaggcacttataaattttccccttagtactgcttttgctatatctcataggttttgggttgttgtgtttatattatcatttgtttcaaaaaattgtttcaatttctttcttaatttctttattgacccactgatcattcaggagcacactgtttaatttccatgtatttggatagtttccaaaattcttcttgttattgatttctagttttattccattgtggtcagagaagatgcttgatattatttcaattttttgaatgttttaagacttgctttgtgacctagcatatagtctatccttgagaaatatccgtgtgcttagaagaaaaatgtgaattctgcagtcattcaatgaaatgttctgtaaatatctattaggtccatttgctctatagtgctaattaagtccaatgtttctttgttgattttctgtctgggagatctatccaatgctgaaagtggcatgttgaatctccagctattattgtattggagtgtatttctctttttagctgtaataatatttgctttatatatccgggtgctccagtgttgggtgtatgtatatttataatcattatatcctcttgctgaattgaccccttggtcattacataatgatcttctttgtctctttttatagtttttgtcttgaaatctattttgtctgatataagcatagctatggtttccactggtatgaaatatctttttcgttccctttattttcagtttatgtgtatctttataggtgaagtgtgtttctcataggcaacagatcattgggttttgttttctcatttgtttagccagtctatgtcttttgattggagagtttagtctgtttacattcaatgttattattgataagtaaggacttacttttgccattttgttacttgttttctggttgttttgtggtgatcttctctttttttaattcctttctgtcttttagtgaaggtgattttctctggtgatataatttaatttcttgctttttattatttgtgtatacattgcatttttttcaactggagattatcatgaggcttgcaaatactatcttataacacattattttaaattgatgacaacttaacattaattgcataaataaacacacaaaaagaaaactagtaaaaattctacagtatgacttaatctcccccactttttaactttttgttgtttctctatatgtctttttatatggtctatgtcttgaaaagttgctgcagttattatttctgattggttcatcatttactctttttacttaagagtagtttacacatcacaattaaaatgttatactattctgtttttctgtgtgcttgctgttaccagtaaggtttggaccctcagatgatttcttcttgctcattaacatactttgctttcagattgaagaactccctttagcatttcttgtatgacaggtctggtattgatgaaatccctcagcttttgtttgtctgggaagatctttatatcactatgcttaaggacattttagccaaatatactattctgggttaaagtattttccctttagcactttaaatatgccatgctgctctctcctagcctgtaaggtttccactgaaaagtctgattccagatgcattggagctccattgtatgttatttatttatttttctattgctgcttttaggatcctttctttatccttgacctttaggagtttgattactgaatgtcttaaggtaatcttctttccattaaatctgcttggtgttctataaccttcttgtacttgaatattaatatctttctctaagtgttgaaagttctctgatattattctttcgaatacactttctaccctatctctttctctatattcttgttaaggctattaactcttagatttgtctttttgaggttattttctagattctgtaagtgtgctttattttttttttgtcttctctgtgtattttcaaataatctgtcttgaaactcactaattctttcttcctctcaatcaattctgctattaagagactctgatacatttttcatcatgtcaattgcatttttcagctctagaatttctgcttaattctttttaattacttcagtctttttgttgaatttaactgatacaattctgaattctttctctgtgttatctttaatttctttgagtttcctcaaaatagttattttgaattatctacctgaaaggtcatatatctctgtttctccaggatttgtccctggtgacttatttagtccatttggtgagatcatgttttcctggatggtgttgatgtttacagatatttgttagtatctgggcattaaagaattaggtatttattgtagtcttcacagtttgggcttgtgtatgcctgtccttcttggcaaggctttccaagtatttgaatggtgtgatggttaatactgagtgccaaatggattggattgaagggtgcaaaacgttgttcctgggtatgtctgtgagggtgttgccaaaggaggttaacatttgagtcaacagactgggagaggcagacccaccacccatccttaatctaggtgggcactctctctttggctgccactacagctagaaaaagcatgcagaagaaagtgaaataagcagactttctgagtcttccagccttcatatttctcctgtgctggatgcttcctgcccttgaacattggacttgaagttcttcagcttttggacttttggacttgtatcagtggtttgccaggggctctcaggcctttgaccatagactgaaggctgtactgttgtcttcgctacttttgaggtttctgggacccggactggtttccttgctcctcagcttgcagatgacctatcgtgggacttcaccttgtgaatgtgtgagtcagtattccttaataaactccccttcatatatacatctgtcctattagttctgtccctctagagaacactgagtaatacagattttgataccagggtatcaaaattctgttctagaggaacagaattttaaggatggattcctttagttggttttggggtttctggagttggctgcttaatctgggactctacttctaatagtatggaggacaactgatactatttggcatgaactgtttagagttatgtaaaatagatgcatttgatactcccaattcacaggcaaggagtttagtgactctatacataatacctttaaccatatatggataaccaaggaatataatgaagttggttggttgctcctaagtttgctggacaaagcgatgaaagaaaatgatgagctcagagattctaactcccagcttcagaaccacatactgagcctcaaatcttctaagattgccctgagtgagagtcttatctcctgtagacaaagggctgaaattgtggaaaatcggacacaagctcttatcatgtgagaaaggtgcatgcacaaacacaccaggtgtctactgttaaagtgaggattgattgcaaaacaatgggacctgaaacttagaatggggacttgtgggaggacgctgctgagggtggaggcactgagctcctaagttctgatgagcccttttgttgccagagaaaacagcctctccatccccagtagtggcaacatcaccttccccacccatgctgccatcagcctttccacctttgtgtgaggagattaaccatccactgcccggggcaacagtgatggcctcccttgaggcagttgccaggcaagacaatgctgattctcttcaggacccacccgcaatacccctgtttgcttctagacctaaaactagactccagtcccagcaggcccctagagatgaggttcagagtgtgacccatgacaaggtgtaatacattccagaagaactgcttgtgtttttaaatttatataagcagaaatctggagaacaggcatggaaatagatattatggctgtgggctagtggtggaaagaacataaagttgaaccaggcttaatttattgatttgggcccactaagcagggattctgcatttaatgttgcagctcagggagttaaaaagggttctaatagtttatttgcttggttagctgaaatacggatcaaaagatggcccactgtaagtgggtgtagctgccataatggacagcagagacaaagcagcaaacacatagtctgacttttgtagcgctctggcattggctaatcacagtgttcctagaagtgaaattgataggaagcctactgcattcttacttaatttgaataagcagaaaacttccaagtagagtggacaaaagactaatttgaattatataaaaagagaatcatggcccctcaataaatttccagacttgaaccagtttatagacccagagccccttgaatgaagaggaggctggctccccttgagaaaaaaatcccactacactactgacaattatactgttaatttttctctcatctttcctcaataagacactcaggcttttaccagggtaactgcactggggaaagggaaatggtcagaacctcgggggactacaggacactggctctgagctgatgttgattccaggggaccctaaacgtcattgtggtcctccagttaaagtaggggcttatggaggtcaggtaattagtggagttttagctcaggtctaatttatagtgggtccagtgggtccctggattcatcctgtagtcatttccctagtggcggaatgcataattggcatagacatacttagcagctggcagaatccccacactggctctctcactagtagggtgagggctgttatggtgcaaaaggccaaatggaagccattagagctgcctctacccagaaaaatagtaaatcaaaaccaatattgcatctcttgagggattgcagtaccatcattacttaaaagatgcaggggtggtgattctcaccacatccccaataaactctcctacttggcttgtgaagaagacagacagatctttgagaatgacagtggattattgtaagcttaaccaagtggtgactctaattacagctgctgtaccagatgtggtttcattgcttgagcaaattaacatatctcctggtaactggtatgcagccactgacttggaaaatgcctttttctccattcctgtccataaggcccaccagaattaatttgccttcagcttgcaaggccagcaatgtaccttcactgtgctacctcaggggtatatcaactctccagctttgtgtcataatcttgtttgcagagatcttgatcacttttcccttccacaagatatcacactggttcattgcatggatattaacctgattggacccagtgagcaagaattagtaaatacactggacttactggtgagatatttgcatgctaaaggatagaaaattaaacccgactaaaattcagggatcttctacctcattgaaatttctagggatccattggtgtgaggcctgtcaagatatttgttctaagatggaggataagttgctgcatttggccccttatgcaaccaagaaggagacacaatgcctagtgggcctatttggattttagaggcaacatattccttatttggatgtgttattcccaccatttatccagtgacctgaaaggcttccagctttgagtgggttcaagaacaagagaagggtctgcaataggtccaggctgatgtgcaagctgctctttcacttgggccatgtgacccagcagatccaatcgtgcttgaagtgtcagtggcagacagggatgctgtttggagcctttggcaggtccatataggtgaatcacagtggaggtctctagaattttggagcaaggccctcccatcttgtgcagataactactctctttttgagagacagctcttggcctgttactgggctttggttaaaactgaatgtttgactatgggtcaagtcaccatgcgatctgaactgcctatcatgaactgggtgctttctcacccatctagccatgaagttgggtatgcatagcagcattctactatcaaatggaagtggtatatacatggtcaggcttgagcaggctctgaagtcacaagtaaattacatgaggaagtggctgaaatgcccatggtccccactcctgccaccctgccttctttcccccagcctgcaccaatggcatcatgggaagtttcctatgatcagttgacagaggaaaagaagactagggtctggtttacagatggttctgcatgatatgcaagcaccacccaaaagtggacagctgcagcactatagcccctttctaggacatctctgaaggacagtggtgaagagaaatcttcccggtgggaagaactttgagcagtccacctggttgtgcactttgcatggaaggagaaatggccagagatgtgattaaatactgattcatgggctgtagccactggtttggatggatggccagggacttggaagaagaatgattggaaaatttgtgacaaagaaatttggggaagaggtatatggatggaccactttcagtgatcacaaactctgaagatatttgtatatcatgtgaatactcaccaaagggtgacctcagcagaggagaattttaatgattaagtggataagatgacttgttctatggacaccactcagtcccttttgccaaccacccctgtcattgcagtgggcccctgaacaaagtggtcttggcagcaggggttatggaggttatgcatgggctcagcaacatggactttcacttaccaagcctgacctggctaaggccaccactgagtggccaatttgcaagtagcagagaccaacactgagccctcaatatgacacaattctttaggctgatcagccagctacttggtggcaggttaattttattggacctctttcatcatgtaaagggcagcagtttgtcctcaccagaatagacacttactctgcatatcggtttgcctatattgcactcaatgcttctgccaagactaccatctgtggactcatggaatgccttatccaccatcatggtattccacacagcattgcttctgaccaaggcactcactttgcagctaaagaagcatggcagtgagttcatattcgtggaattcactggtcttcccatgttccctatcatcctgaagcagctagattgatagaacggtggaatggccttttgaagtcacaattacaatgccaactaggttacaatattttgcagggctggggcaaagttctccagaaggctgtgtattccctgattcagcatccaatatatggtaccattttttcccacagcctgaattcacaggtccagaaatcaaagggtggaagtggaagtggcaccattcaccgtcacccctagtgacccactagcaacatttttgctgccttttcccgcgacattacattctgctggcctagaggtcttagttccagaaggaagaatgctgccacccagagacataacaatgattccattaaactcaaagttaagattgccacctggccactttgggcttcttctacctctaagtcaacaggctaagaagggaattacagtgttggcttgagtgattgacccagactatcaagatgaaatcaagctactacttcacaatggaaataagcagtagtatttgtggaatacaggagatcccttagggtgtctcttagtagtaccatgccctgtgattaaggtcaatgggaaactataacaacacaatccaggcaggactacaagtggctcagacccttcaggaatgaaggtttgggtcactccaccaagtaaaaaaccatgacccactgaggtgcctgctgaaggtaaagggaatgcagaatgggtggtagaagaaggtaatcatcaataccagctgtgaccacgtgaccagttgcagaaacaagaactgtaattgtcatgagtatttccctctcattttgttaagaacatatttgtgcacgtatacacttgtactaagaaaatatcttcattttatttcctttctttttcttttattatgtgacatagattgattgactttatataagcatttaagtgttgttaactttatgtaatagcatttaggttaaggattagtgcatttccagttgtatgaaggatagctgtattatcttaggtataattatgacattattgtctttatttgaagattatgtattatttcaggagatgtgcaaaagcactcttatagcctctccagctggtgttttgctaggtcatgtgtgacctcagttcactggctctaagcccagcctttcactaggagtttcctaggaattgcagtccttgtgtcttagactgcttttcaagtttacctaggaccccaaagtacttcagcccatgctggcaaggtttgctgagaaactcaaattctgactgctggaatggggcaattcccctctggctagggctggtccaacttcttccatgcacaggcactggctgatcccagtgtggctttattctctactgtgacaggacattactgagttcaatgtaaagtcccccagtcgctgagctctccttccccaaagggcacagattgtctttctgcactgcacagtcattgtccagaggtgggagaaagggcattggcaattcaagactgtctatcttgccctcctcaatgcctcttttgacaatatgaagttaaaaccaggtactgtgattgctcacctgattttggttcttgtgatgttgcttttctgtgtggaggtagttgttaaaatttggtgttttagcaggggagaacaatggtgtaggcttctgttttgtcatcttgctccatcctctctccttgggtattttacattacaatttaatttccatagaaattatagggctgttcagacgagatcgggcacattccgggtggtatggccgtaggctataggcctattcaaatggtctatttcatattggtgagttgcgatagtttttgtttttcaaggaattgatccattttgtctagctgtcaaatttatttgtctagagttgatcacagtatttcccttttgatgtctgcagggtctgccgtgatatctcctgtttcattcctgcatcgttagatattctggcatctctggcatcttgatgttatcacgtatgaatttttttttgtcgtttaatttcagatattcctggttcttgctgtgatgagtagtttttgatggaaacttttcaatcatcaaacaatacatttttatattttgttataaggttctggattttatttgagcttttggttttagctggctttattttactacactctgttagaggaagggacactgcctcattactgccaggtggagggacaagttcagactctccaaaaggtctgcatgaacaccatggcaggggtggcttttattctggctgatagggtaaacgtccttgctcctgccttgccttccttgacatacctttgttatatccttctgtgtgtggaagcctagactccccatttggcctttgctggtggatgtggaggtgagaccacaactttttttgtagtgtttggctggaatagagtggttattgtctaaaattttactatctggctaagctactcttttccttcttatttggctagaggattttgaatcttggagcttttggttgttttgtctatgagtgttaatatttctgggttactgacattttcatctccaaatttcagttattaaaaaaaaagaaaagaaaggaaaacccaggagactttccactgtaatgttccttggattttgaggtccttaggtggtctgtcttattttctccatccttcagtgtcttcttatgcttgttttatataaaatatccagagatttttgttgcacttagtgagaagactaaggaaaaatatatgtattttatctttctggaagtgtatgtactctatggcaatatacatgaagtgtttatcaaataggagctaaacaaaaatgtggcagaatcatttaatgaaatattaacttgtatttctttttactgtatttccttttttcccctcatttctatcggaagcttttcttgtcagaccactaaggaccccacagcctttatatttatgaactgtagtgtaaaattcaggatgggatccagaaaggtgtttgtctggaagctggaagattaacaacaaagcaccagaccaaattattagaatggggcttgatttgcagcgtcacatttttaaaatcactagatttatttggttaatggcagttggggaaaactgacatagatttgactactcatttttaaaaaaattaccaccaagttttccccattctcctgttttcatggtttctcttgccagcttttctaaaaatttagaaatgcttttctgcctttttttaaatcttatatgaatatcacctttgctgctgctaatgagaagagatccttttctgctccagtattgtaatttaaaattaattgagtaaactgattaaagttataaaattattagaaacgtatgagataaaggacaaaatgtacaggttgagtaatagtgtttttttttaatggcttgtctttactgaagagtttttttcagtagaacagatacaattatgcagggcattacttatgcaaaaatcatataagcagcatttatttttgtgtgtatctattctaattcagtatctgcaatttaaaaataatattatttctatttaaattatagatactgtatatgttcattgtgaaggatatagaaaacacacaaaggtacaaagagaaaatgtgaaaaaagtcaaataattttaccaacagaaaaccaatgttaacattaatgaaattcctttctatttttaaatctctgtgtatatatgtgtgtacacatgcatattttgtagtctaatttctgctaaattggtgtgtgaatacatacaccgcacagacatacacacttaatattgtattgtgagcattttcttaggtctataaacttttaaaaaataattgtattatagggaatataccatctttttgttcaaccattttcttaatataaataacaatttaatacatataatctctgttaaagtttttgattatttgtcaaggatagattttttttaaggatatcaatatcttggaacatagaaactttttaaacctttagtgcagcattacaacatttattagcaaaaagttgtgccagtttgcaaactcgtgaagatttcaaggcacccgtttactataccatcactaacaatgagtagtatttttttcaatctttgctttaaaattgtatgctaatataggtaaaagatgatacctttctttttaatttgccttagaaatcattattgagataaaacatttggccatttgcatttctacttttgtgacttatgattcacatcatgattctattagagttttaattttttatcttactcattttaaagaaatctgtatgtattgaggacattaaacttatgtcatatttgttacaaatgtactgtttattacttggcttctaaggttgttataagattttgacattcaaaagttttaaaaattttttagtgaaattacctttgttacttcatccatttctactatgattagaaactgcttagatctgataaatatcatctgcctttcttctatatgtaagtggttgtgttgtttatattgaaatccatatctttctggagttcattcttgatgtagggtgtgagataagatctagtttaatttttcctattagtaagaaattgctgttaataatatttccctttcatgtttattgaaatgtcagtttaaacttatttaatttagacatatattagttgctgtttcttaatttttattctttctgtccatctatgtttatagtagaacaactccaattgtaacattttagtattttttattatactaatagatggtactaaaaattgttttaaaattgtattagcctttcttggatgttaattctttcagatgaactttaaaaaatactttattaattctttgtctcccccttataaaacaaaacaaaatgaaacaaaaattaaagcaaagcaagaaaacaaaccaaatcccctggggcttatttaatatagttgcaccaatcatataaattgtttggaggaattaattgacattgtgataatactcagtcttcatttccaagatgatgacatcaatctctgtttactcaagtcttccttcatctttcagcaatgttttaactctacaggcaaaaggagaggtttgggtgagcagaggtggcagatgacttcatgcagaggcctgcaggttactctcaggacctctcccacagtctagccctcagccttgaaatgataggcacttggttttgttaatatgccaagaatgggtctgtcactcaggaagaaatttaaataaaacattctcagaaatgtgatggataaaatcagaatgtcagtagattgatttacaaagataaataaatgtagaggaaataggcccctcatgcattgtaaccagaacattgcctccctgttggttcccattcaggggaagaaacacaggagcagaagatggctttgtgagcctggagtcagaacaaatgatttgaattatgtaatttaattactgaacaaaatcaggttacaccagtctaagtccatcctttctatatatgtacacctgcaaggtggtaaggaaagcagtttttttttgttgttgttgtctttgtttttctatatggactatctttctgtgttttgttttcctttacacatttgggaaatatcatcttaataaatactatgctttaacattttttaatttaaaaatatacttaagcttccctcctttctgccacctccattaaaattatagtaaaaaacaaaacaggcatagagccagaagagcaaagaaagcagcaaagaggtccatccacttatgagagaactgaataaatagccagaagacggaaaacaagggaaataaatgatgacaaagtagagaaagagacagaccaactacacgaagaagtttgcttccaaggtaagcatctttctgcctggcagaattccaagaaagcaccatgttttgagacttgggaggtaaagagaagtgaggtgtgttgacaacagtgggtttgatggccaatctataggattttaaaattggcatccttcattcacaactggtgttcagagtgaaggcaaaacttccatttccctaggaaatccttctccagtgaccagaggaatgaccagctccccaccttctcactgtccagcagtccctgctaacccacaggtatgtgctgatgccagttcacctacttcctcacctgtgagcacaggtcacaaagagggaagatgttgaggaagatttgaagcctgaaggacagagggggacagcacattaggaattctagtgagttagtttaaattcctcactttctcagagtgaagttaacaaacaataccaaatatttgaaaaaaagcaagcagtaaaagtgtaagcattataattcaaaatacataagttgaaaacaaggaaaacaacataaatgatgaaaaataattgctccttctccttgatattgagatcagagagtgacaatagggtgataagacattgctttaaaaaaattccttatgtacttcttgatttaaaaaaatgtaagtattatttgggattaaaaacaaaggaaaacatttaacatgcagaatgaatttataaacaaaagaaactatgttaaaccattttcatttatattgttttatgttttcaattttaaaaatgaaccaccttttgtataaggagcacccaacaaaatatctggcacttagtagttgctcagaaagtacttgttgaataaataaacttatttgcatttttaaacttttttccttcattcgcctcattcttagttttcgtttaaataatttagaattctagatttacattattattgttattattattctgttacacatacatcttataactcatattagtgaccgtagcccatccttttaaaaccacaataaaaaacacaacttccttattcttgagtgtttaatttcaaataacctttttaccggctggtctacatctttcagtaattttctcagaaagaatatttgggaattagactttttaagcccttaatatctgaaaataacaatctgtggacttcccacacaagtgatgatttgaatgaatatagaaatctctagttaactgcttttgatctaaaattctacattgtcctttttttgttgtttcttcttccatgttgtgaaagggtagtctgatgaatttggccagaatttggtccctttatggtttatctgttgatccttggctacctgtagaatcctttcctggatctgaaatttaaaacttttcaggaagtctattttcattagattttctaatttttttgtgaacactttttgatttgtcgaagtgaggtagaacaaaaccgaatatcaccagctgttcatcttcttaacttggaagttccttctttttttactctagagagagagtgtatttttgagtaagtaaaagtagttttcgaatgcatttggggtaaagcatcatcaaatgaaggatataaactccatagatacatcactatgacttactaacaggacaacttttcctttagttaactatccgtgggagaaaccaatatgtgaagaatagctataatttcttgttccatggagttttttcaagttaccccaaagaatttgataacatgtcatcaagtgaaagatataaagaactcatgtgtagtttcacaggactgtgcttaggatactctatttttagtttgagtacccctagtgttcttggtacttttcagttatcttgctgcctctcactgagtcaaagataaattcaacaaaggcagagacaatacccactgattgtctgcatcccacatagtgggatacatagaaagtgctcagttagctttgattgacagatgtgctaatcatccacttggttggtagtcttacagctgtccctgcttgaacccaagctatatttacctctaattcagacatgttttgattgttatgtgggtagatatgataagccttgcaggcctttttacatgaagtacctagggcttttctgctcagggtgtggtttgggaaccaggagtattaagggtatctgagaacctgttaatgatgtagaatctcaattcccctcatgtttactggtttacatacatacattttgagaaacactgcatttggagattcctgcactagatacaacccaaagaaataactgagggatatacaggatatggtcagagggaactctggacaccctctggctgttctcatgggttgaatatgatgagcttaataaaacaactagcggctattaaaatctgtgtgggctttgagttagcagtctcctgcagctttggtgcatgcagctttggcaactacaggagatagctgcggaactcttggcagtgctgcagtgcccttaatgctggcattggtggccttgatggcatctgcactgggtatcatctgcatagctgccactgggcttgcagcaagaggcttcaacccagcaagctggagcaggagagaggaaatgtgctgtcagcctcttattgccaagagggctagtttttggaacacatctcacttcataccagatgaaatggagccatcagatagctggcctgaacttacaaaattactttcacggcatccattctttccttcttctcttctgttacatttaggttctgcttctatgacttcatgctttctcaaggatcacgttatcatttgtctttttgatctcctatatctttaatgtctcttttaatatggacatcttctaataaatccttaaatatgatcaactatttctctcttaaaaaagtagcacctctgatgccaccttctgcaccagctatgctatctttaaccatctctttaaagataaacttcttaaaaagttgtttacagttattgctttcatttctttatcttccattcattttattgtcacagatttttatgacaactgtcactgattttttaaagctgtgaaatataaatgcagaacgattacagaaaatacctgtgtatagtttaacaaatagttaaaaagcaatgcaagagtaaacacctcccttctcgagaaatagaatattacaaccactccagaagccttcatgcatcttccaatgttatcatctccttcctctctaggtataaacatttttatcttttgtaaatcctttctttatagttttatcctcttcatatgtatgactaaacaatataatttttcctgtttttcagttttatagaatataatcactctgtgtgtattcatttctatatctatatctctctattcaaaatcttcttttactcaatgttatgtttataagatttatccataatgttgggtgcagctgtagttcattttcatggctgtatggtattctgttgcatgaatacattgcaatttacttatccactctactctaaatagacattcgggctgtttccaatttagagctattatgaataatgtttttacttacatgtttattcgagtatcctggtacacgtatgtaagcatttctgtagggtatattcctgggaataaaattcctgggttataggtcaggtatctttaatttactagataatgccaaacctctttcattccatcaaccatgtttagtgggctccttctcttgacatcctcaacaatatttgatagtgccagacattttaccctttgcctattaagtgtgatgtgcaatggtattgagtgtgtcatggcattttaatatagttttagtttttattttcctgagtattaatgtgtttggccacgttttcacatatatatatatagactatttagaattcattcatgtaagttgctattaaactcatttacctgttttaaaaaatggatggtcaatttcttattaattcatagatattttttatatatcttggatacttgattttctagttattttttctgcaaacaccttttgccaatctgaacttgtctttttattatctttgtgatgacttgataaatatgaggtcctaacattatatatatatatatatatatatatatatatgttttgttttgttttgttttgttttgttttgttttgagagagggtccggatctgttgcctaggctaaagtacagtggtgtaatcacagttcactgcggcctcaacctcccgggctcaagtgattctcctgcctcagcctcctgagtagctgggtggtgcatgccaccaggcctgaataattttgatttttattttgtagagacagtatctcactatgttgcccagactggtctctaacccctaggctcaagcaattttcccaccttggcctcccaaagtgctgggattataggcatgagccaccatgcctggctgagttcttaattttaatggagctcaaattttaatggacttaaaaatattagtaattttcttaatttatagcactttttgtgtcttatttaataaactatgtttttaatcagaacttctgaggaattgtcttgtataatctttataatttatctttcacatttaggtctttaatttacctggacctgatggttgcgtataaagtgaggaaacggtccaattttttgtctttttgtatgaatactcaacagtctaaaaactattcattgtaatatctgtcatttttccacttgtctgcaatgccacctctgtcatctatcacgtgttcattataggtaaatttgtttttctgttctttattccatctgtctacccacattttgttactatcgtttaaaaataagcctaacgtacagtaaagggcgctctcccagcctgtttttcttctttgagaatgtcttggctatctttggcccatttgcatttccatgtaaattttagaatatgcttttcaagttttgtacaaataaccatagtaggatattgtatggcattgcattaaatctataaatcagttttaatataatggacatttttagtggtgttttaatccataaacataatatacctctccatttatttaatatagctcaataaagtttatatcaaaatatacaatatttgttaaagcattgcacagatatttttgaatttgcttctagatttgatactactatgaatgccatcatcttcaaaattttattttccaatagtttgctctgatatattgaatactagttgtttccacaaatttattttgtatctggcaatgttgttaaacccacatatcattttaaataatttatctgtagactatttttgaactttatacatacacaatcatgccatctgtgtatagatacagttttcatttttcttttcaaattcttataaactcgatttctttttatcttactgcattggtttagatctctgataccatgccaaattaaatggtgacagtggaaatccttgtcttatttctggtgatgaaggtaaagattttaaatatgacatttgatcaaatatttttgtatatacttttatttggattaaagaaattccttccaatactggtttctaaagcgttttttttttcaataaatgtgtgttgaattttagtgatccttttttttctgaaatcactgagattattactctgatctgttaaggaagtgtattgattaattttctaacattaaaaatgaaaacttaccttttaaacctgaattattttcatagtgatgtgtttgctttgttagcattttaagatgtttgcatgcatataaataagtaagagatctgtaacttttcttattatgctgtccttgttaggcttttatttcaaatctatgctgttccataaatgcactgagagctattcccttatttcctgtgatttttaactcctcttctatacttactacataacgtttacattattgaaaatatgcttagtagaattccttgataaagtaattagggcattgtgatttctttgtggaaaattttaaaaattactgattcattcactttaaatgtctatagggctattgagatttccaaaggttttttgattttgtttgatatgttactttttttccctggactagacacatttgttttaatttttaaaagatacttggaaggaagttgattttgatatctttttattatccatttcatgtctctagcctctgtcgtgatattcccttgttggttctttgtattgctaattgtgttttctctcttaattttttcaataactcatactagaagtttacacagtttattagtctttccagaaaactgttaatcatcgctttgcaagttagttttcttcagtcttttctagtcattttaaaattattttcatttataactttattgcatttataacttttatttgctttgtgtgttgtactttatctaatttgagatggtttcacagattaggttcttcaatgcagacactgaggtgaagttggtggtgcaagatgagaggaagctggcttacggcacagggagaagctgaacttcggtgcaactcccacaaaccttagccaacttggtggggagctttggtgccaatatttcctgttgaagtagtcctgtcttggacttctcagcattgtactaggcccttaagcaccctcttcaatcagttattagatacaagacagctcaggaagaccgtggcattaggacaggcagctctctgcagctgaggcagccccggtaggagctgacagctgaagattgtctggaaactgtaccacctaccaccaggcagtgagtccttctccgaaaaaggatctgggtcagatggatgctcattaactttcacgcacctttgttttctcacatacacatcaagtctgtgaatgtccttctaatctctgctttatgtgtattacacagttctgcgatgtgtttttgttagtattcagtacaaacacatttaaaaacatttgtcattatgatttcttttttgacacatagatatagttagatgtatttttcttaacttctaaaatgtatagtttttgccagctatatttttgtcatcagtattagtttaactacaacatgcttataaatataatcggcatgatttcatcattttaaactttattgagacttgctttatgtcccaatagtcaattttgtaaatgatattcttcaaaaaaatgtgtattctgtagttgttaggtgttcctattcgagaggctgtaaccagggtctccaaccaccagaaaggaatgctatctgctagtggctactgtggattattttttcattatcctcctttaaaatgcaaatatcctttggagtgttgagtaatgaacgtcttaaaattgggtatgagaatgaactgaattaccgagggagtgggatttgtgggaaaggacacacacactcacacacactcacacacacaccactgtttattgcaggcttagtaacatgcaagtttattgtgttcacatacattatttcactgaatccccacaataattctgagagaagggtattctacccattttatacataggaagctgaggctcaaagagtttaaagagcttgctaatatttgaactcagaggtatctgatactggattccatgctcttaattgctatgtgcctgtctccccataactagcctcagttcctttaatacactaatttggtcatctgattcacaatgcagttatcattacatttgtaaaggttttctctgattctaatggatattgaaaagataagtgatggcagaatcacttattctttaatttttaagcattatcagtgaatcattatgtagacggcttaggctatgagctcaagattatgttatgagctcaagaaatgcaaaggtaaagaaaacacagtccagtccagtaagattgggagacagacatgtgtacacacaatgagaagtcatgaagggaaggtgggctggctgtggaattagtcaccttgaagtctgtctaaggagagggctggtatcagggtgtggacattttacatttctatcacagcattgtagttgatcttagagactcctaccgaagtttggggagaagagaggtaatacagggatttattttaaatttcttcttataattaggtcaattctagaatatgaggaatgaatgacagttcaaacacagtgtctgaaaaaggtaaccacattttgtaaagattccttaaatcaataggttgaaattccagtaatagagctccaaaatttcaggggagcctatcctatgggaaagcagagccctgttgctggaaatccactaagccatttacaaggagtaaagaagggctttctgaaatgttgacttagggacacagagcttaaactcagagcacttattttcttctctgctctccggctttctgtctctggctgcatcattattctttattgactatttcataaactcacattccctcagcttggttaaggaaggcagtctttaatcttggcggagcagataaggacaattaaatcctgggcctgcttcctgacacagatgacggggctgccttcctggaacaccatcttcatgtcatgggttctgctgtcacttattttgttcggaatgtgtcaggacagctagcatgacctcagcattcccctcaggctggtgcttctttaatgctgaataaaatgttctcctggactctttcagggtggatttgagacccagccctgtgggctgaaggaggatgggtgcaggtctgtgaatctcttcttaatctttcagctagaaataactactcctttctgtggtccttttgcaatttactcatggcttcttttcttttcttttacttcttttattttcttttatgattgttcttacaatagcctgctttgatctccactacgtctggttattggagaatacatcaactgttttgttgactcagcaatacttaatcaattctaatttcagcactatttcttttgaaaattcctctcacctacttttgccagtatagtaaggctatcagtttcagcagtaggtttctttgatctccagaacaggtttaggatccaggtttggcccatcatagtacaccattattttggcttcagtgattggctcctcagtgaaatcatgatcctaaagttgaccaatcagaggtttttcctggggatttttatatatggatactggggacagatggtatttttttcctcttgtagtgcaagctgaaagaatgtggttacaaatctaattatggtgatgccctttaacttatggatgggcataagggagtgaggccaaaatgcaactttaagccaagcgagagatagagagatggagactgctagtcgggatgctgtttgaatccctgaatgcagtctttcctgagactaaattatatttagtcttttaaccgtaactgctaaaagtaattttttacttttaaacttagaatataagttcaaagagtgaaagcagagatttttctttacattttcactgctataattccaaatgcctagaacagtgcctgtcacatagtaggcagtcaattaatatttgcttaatgaatatttgcaactgaatgaaacaggataatcagagtatgcatgtcttcctaactgttttaagggattcttgggaaaaaaacccagggagcaattatcatagagttgttggaattaaagctagtttgtgggactgtcctgagaatttattgttattgaaatttttttaaattttgaagtgtaacacacagaaaagtgcataaagcacaaataagcagtgtaatgggattatttataaagtggacccatgaccactaggtagttcaagaaatagaaggcttccagccttccagaagcttctcgtatttcccatctggaatatttccctctgtaccagccagaggtaaacaacatgctgaattttatggtaatcacttcattgctttgttttataattgtagccccactatatgcatcacaggacaatgctatttagttttgaatttgtgaacttaataaaaataaatttcacaatacatatattattttgtgtcatgtttctttaacactacatttttattattcgtctaagttggacatcgcattactttattttcattgctctgttttataaataaaacatattctgctgctacaacaatttttcccagttttggctgtaaaaatctatgctgccatgaaagttcttagacatgtatcctagtacctatgtgtccccattttctatggcatatttacctagaagcgaaattgctgagtcattgggtatgcctattttgaactttagctaataatgttttatattgtccttaatacgaggctttctctgatttttattatagccaattcaatggttgtatagttttatcttgctataatttttatttgcatttttctgattaccaaagaagctgatcttattttgtttattggccatttgaatttttctcttgtatacaatagctagttatgtttttggcccactgtttattgatttgtctttttcttttcaattttagttctgtgtgtgttctggatacaagtcctttgaatggtaatatggctaaagatagcttctcacattctgtggcttgttttcttctctttctttataatatggtttaataaatagaagttcttaattctattgttgtcaagtacaacataatttttttctatgaataataacttctgtgacttttatgacttaattaccaaagtttcacaccatcactttgccatgttcaatttattagacagagtcactaaatacagcccgcaattaagggaagaagaattaagctccacattttcacgggaggagtcccccaaaaatttgcagacatctttcaaaatcatcacacatgataaaatcaggtgaaggtttttgaagaggctgggatatatttagagcaaagaaggcttaaatgaaataaagaaatcatagatgttggagagaggtgagattagaatacgtgtgttttgtctttcataggtattttctttttgtgccccagatctttgcagaagctgtgcttagtagtgatggacgtttagttggtgtgtgctaaggacttattcactggctgatttgttgtaatggataaattctcaactcgtgaccagatttttatgatcgctttcccagttaatctgattagttatctgattagttcaaaatactggttgccttgccctaaatactgaatttagggtcagatcttttttttttattattattatactctaagttctagggtacatgtgcactacgtgcaggttagttacatatgtatacatgtgccatgttggtgtgctgcacccattaactcatcatttgacattaggtatatctcctaatgctatccctcccccctccccccaccacacaacaggccccagtgtgtgatgttccctttcctgtgtccatgtgttctcattcttcaattcccacctatgagtgggaacatgcggtgtttggttttttgtccttgcgatagtttgctgagaatgatggtttccagcttcatccatatctctacaaaggacatgaacacatcattttttatggctgcatagtatgacatggggtatatgtgccacattttcttcatccagtctatcattgttggacatttgggttggttccaagtctttgctattgggaatagtgccacaataaacatacgtgtgtatgtgtctttatagcggcatgttttataatcctttgagtatatacccagtaatgggatggctggttcaaatggtatttctagttctagatccctgaggaatcaccacactgacttccacgatggttgaactactttacagtcccaccaacagtgtaaaagtgttcctatttctccacatcctctccagcacctgttgtttcctgactttttaatgatcgccattctaactggtgtgagatggtatctcattgtggttttgatttgcatttctctgatggccagtgatgatgagcattttttcatgtgtcttttggctgcataaatgtcttcttttgagaagtgtctgttcatatccctcgcccactttttgatggggttgtttatttttttcttgtaaatttgtttgagttcattgtagattctggatattagccctttgtcaggtgagtagattgcaaaaattttctcccattctgtagcttgcctgttcactctgatggtagtttcttttgctgtgcagaagctccttagtttaatgagatcccatttgtcaattttggcttttgttgccattgcttttggtgttttagacatgaagtccttgcccatgcctatgtcctgaatggtattgcctagattttcttcaagggttttgatggttttaggtctaacatgtaagtctttaatccatcttgaattaatttttgtataaagtgtaaggaagggatgcagtttcagctttctacatatggctagccagttttcccagcaccatttattaaatagggaatcctttccctttccccattgcttgtttttgtcaggtttgtcaaagatcagatagttgtagatatgtggcatgatttctgagggctctgttctgttccattggtctatatctctgttttggtaccagtaccatgctgttttggttattgtagccttgtagtatagtttgaagtcaggtagcatgatgccttcagctttgttcctttggcttaggattgacttggcaatgtgggctctttttttgttccatatgaactttaaagtagttttttccaattctgtgaagaaagtcattggtagcttgatggggatggcattgaatctataaattaccttgggtagtatggccattttcacaatattgattcttcctacccatgagcatggaatgttcttccatttgtttgtatcctcttttatttcattgagcagtggtttgtagttctccttgaagaggtccttcacatcccttgtaagttggattcttaggtattttattctgtttgaagcaattatgaatgggagttcactcatgatttggctgtttgttattggtgtataagaatgcttgtgatttttgtccattgattttgtatcctgagactttgctgaagttgcctatcagcttaaggagattttgggctgagatgatggggttttctagatatacaatcctgtcatctgcaaacagggacaaattgatttcctgttttcctaattgaataccctttatttccttctcctgcctaattgccctggccagaacttccaacactatgttgaataggagtggtgagagagggcatccctgtcttgtgccagttttcaaagggaatgcttccagtttttgcccattcagtatgatattggctgtgggtttgtcatagatagctcttattattttgagatacatcccatcaatacctaatttattgagagtttttagcatgaagtgttgttgaattttgtaaaaggccttttctgcatctattgagataatcatgtggtttttgttgttgtttctgtttatatgctggattacgtttattgatttgcatacattgaaccagccttgcatcccagggatgaagcccacttgatcatggtggataaggtttttgctgtgctgctggattcagtttgccggcattttattgaggatatttgcatcgatgttcatcagggatattggtctaaaattctctttttttgttgtgtctttatagacctacaaagagacttagactctcacacaataataatgggaaactttaacaccccactgtcaacattagacagatcaacgagacagaaagttaacaaggatatccagggactgaactcagctctgcaccaagcggacctaatagacatctacagaactctccaccccaaagcaacataaaatacgttcttttcagcaccacaccacaccgattccaaaactgaccacatagttggaagtaaagcactcctcagcaaatgtaaaagaacagaaattataacaaactgtctctcagaccacagtgcaatcaaactagagctccggattaagaaacacactcaaaaccactcaactacatggaaactgaacaacctgctcctgaatgactactgggtacataacgaaatgaaggcagaaataaagatgttctttgaaaccaatgagaataaagacacaacatgccagaatctctgggacacattgaaagcagtatgtagagggaaatttataacactaaatgcccacaagagaaagcaggaaagatctaaaattgacaccctgacatcacaattaaaagaactagagaagcaagagcaaacacattcaaaagctagcagaaggcaagaaataactaagatcagagcagaactgaaggaaatagagacacaaaaaaccctgcaaaaaatcaatgaatccaggagctgtttttttgaaaagatcaacaaaattgatagaacactagcaagactaagaagaaaagagagaagaatcaaatagatgcaataaaaatgataaaggggatatcaccaccgatcccacagaaatacaaactaccatcacagaatactataaacacctctatgcaaataaactagaaaatctagaagaaatggataagttcctcaagacatacaccctcccaagactaaaccaggaagaagttgaatctctgaatagaccaataacaggctctgaaattgaggcctgttattggaattatctgaaattaatagttttccaaccaaaaaaagtacaggaccagatggattcacagccgaattctaccagaggtacaaggaggagctggtaccattccttctgaaactattccaatcaatagaaaaagagggaatcctccctatctcattttatgaggccagcatcatcctgatgccaaagcctggcagagacaaaacaaaacgatcttaaccaattaatttcaaattacttttgactgtagtcagaatgattagaagttcatgtttctcctgcctttagacatcttaatacatcctccaactttttcttactttttttttttttttttttttttgagacagagtcttgctctgttgctcaggctggagtgcaatggcctgatcttggctcaatgcaacctccatctcctgggttcaagcgattctcctgcctcagcatcccaagtagctgggattacaggcatgcaccaccacatctggctaatttttgtattttcagtagagacagggtttcaccatgttggtcaggctggtctcaagctcctgacctcgtgatctgcctgcttcagcctcccaaagtgctgggattacaggtgtgagccaccacgcctggcctacatcctccaactttctcttctatttcttccttttgaaaactagccatcttattttcctattcccatcctatctgtcatatttagagagatctgtcaaatttatccttgatgcagacttatgcttaatagcttaacaaaacattactacatccatttattttttgcattttagtaacatattttggagatagaaaactttaatataaaataattactttcttattagtacaggaacgtagtgttcattcattcatatacgtgctaataccccaatagttggcacaaaggccatgaaaagacatgagctattctatccacaaacaagatttccccatctaactatatctagctctgcctgctatacttgtttgcccttgaatttatccagacccgaagcagcagcatattggctttgcacttgtgtttttgttccttctgtgactttgcttctcttcccaattagccactgttctaatcaatttaatccatctctgacagcacgccatattttcctatcttgttgatgagcatgtcatgtggaacagagtcagaagcctccctgatgtcaaaatatactatgtctgtcccttccttcttgcatacaacgtctgacactctgtcagaggaggcaattgaattggtctaacatgatttgttggtcacaaagtcaagctgattattacctatcattctgagcccttccatgtgcttgcaaattgattaggcatcttgatcttgtggttaatgcactttttgtcattgtgtagagtctgggacacttcaatgcaatcttgggctactgtgagaatacatttaccatctattccactttcattaaagataaagagctcatttgcttttatagctcagaaattctaagaaaattcttaatgctctcaaggactcttgggaatcttaatagtagcctagatttggcatcacaagagttaaaacgaaatcaagtttcttatccttattaccaggaaagacaacacacgtttgttgagtccctgctatgtaaaaggcatttctgctgcttggttatgcgatagatacaaagttgtataagacggtctgaaatcttgtgttgtctgtagagaacacggacacatgagaaactaattgacaccaaaatattttatgtgaacaatggggaaaaaaagaccatacagctttttggttggttgtgtgttattaggaatcacagtttctttgtgcctgcttgtctagctaaatcatttaaaataataatgcagacatattatttgcatatttcttttttaatttaaaattttaaatgatccataatagatgtacatatttttggtgttcatgtgataacaggtacaaccatataatgtgtaaagatcaaatcagtgtaacagatacccatcaccttatatttatcttttctttttgatttgactgcttcctaaatttcgactcatcttttatttatctacatcctcaaaatgcctagtggcagtgaggctgatttatttatattcttggtgtcattacatgtttcctattgttttctttgtctttttctttttatcagctttgtacttatgcctaggtaagggcttgtaggtatgttctttcaaggatgggaacattttcccaagattcttgatcgtagggtctcttgagaactctcactgttactgttctagggtctcttgagaactctcactgttactgttcaataaaggcttggtaataacatattatcaccatcaacaaaatataaaaaatataactccttgtatttataagcatattgataagaatcaaattattaatgaaagaataacaaaaatgcttggcaaaaaatatccaacgaccaccttttttattttgctttttttccaaacagatttattttaaaatacaattctgaattaaaaaattaaaatattccaggacaaaacatttgtcactatactcagctacaatcctttgaggaaataccttttctattgcttattgataggcttctgtcattacaagtttgaggtctcaagagctgggaaatattaggatattggatgataccggatgatattagataattattgataattctattaggtgtgctgaggtacttaggaaattattagttctcagagaaggatactgttctacttaaagtgtagtgctataggtaaattccttggaaatgtttggcaatacataatacatgtacataaatacaatacatatatgtgcatatacatgtaaaatatctatttgaagtctcaggtcttgagcccagaagaagcttcttggaagctcttttccccctgcttcttctgatcactgcattttttcatggctttatgaccccacaaccatcacctttactttttctcttctatgccactcttactagttctaatgtattttcccagtgtatgaaaagggaatcttatattatatcatccagtcaatattttgagcctcacagtgttctgcagtctattctttttagccaagtgaaaatgaaaaggaggcaacagagagggatgcccatgtctgcatcaaaacctgcaatgcgcacacactcctcatctgcttgtctcctcccttgaaacacacgtagggtgtgacaatgaagatctgataagcaaagtagtaaaaaaagatcaataaataaattcttcagacaagtggccctcaagacaagtttgctgaatctgtaacttagacatttaaaaatctgccaaagtctctccttgctaaagaaatatcataaaaggctctcataaaaaggctgatgttttctccagacataaaaggacagaaacatttcaaaagagttatgatacaacttggcttttttcttggcataaacaacatttccttgaggttaaagggttgaagtagatctagtaactttagaattttatttcaataaagcaaaatcaatcaataagatgtatgctgttgaaatccaagcaaactctggcatagtgtaattgcacaaaagtgtctgagaaaaaagaatgtagatcaataattgattttctctcatttaaattttttattctctgtcggtcaggatacagactaaagggagtgaaggcctttttaagctccctgcttatttgaagtgtgcaatagatggataaaagcaagcttcttccaaacacagttctcttgctttctcatcattttgaatctgtggatgcaaagaacaatttttgaagtacattaaaaacaacgactacagaaaagatcaagctcacattaataaaaggaagtatgggctagtgcatacatttgctgcataaagcacatggaatatactttttctgattctcattcattcaaaattttgaagcagcctagagctgtaagaactttggaggtcttttattttggctttccatttttagaactcctaagtggtggtgaccatcttatctccaggtgctgggaagactcccactgcatgaaagctgggcctttctattattgggcaggttaaattctaagaaatctttcagttttattggatacaatctatttttcactgatggattctgactttgtcttttgcagctatgagtaatagctaacaagggaggcaatagattgtagaaaagtgcctctcaagtgtggttccttcactaccagcatcagcctcatctgggaagtaataacaaatacaattacaaggttctactccaaagagatcgaatcaaaaactctgggggtgggacccaaccgtccatgtctgaacagccctcctggtgattctaaaacatgctaatgtttaagaatccctgctttatctattcgtcttataaataatgagtctcattctaggacagtttctagaactgcctattacattcctctgaacaaggtatgggttgaataagcaaacccaagtgtaccccttttttgaaaacagtctaagtcaaactatccaatccaattcaagaagcagcaagcccctaccttgattgatcagatcaaagaacacgaataaaaaaataggtttgtcatatctgcaaggtaagtaaagatgcattttttgattattagcaccatgtaacagaagctgctagatggaacaattccaaacaacaaaaacaaaaactggtggtgaaatttttctttttctttcttttaaaaataaatttggatttatcatttcttttatgatgctttaaatgtcagggaaagcctatccacagtgtgcacaagtctaattaggattataataagtaactgctggaatgattttgaaattggcgctaatctactcttgttactccgtgcttgaggaaactgagacttaacgtagatcaataatccatcctcataaaatttagttacatgcagacagttagtagcagattctgcactcggaaacagtctctggattcccgatcctccaggctttctcatccatgtccggctgcatttcttttcttattctggatttattcttgttaccatggaagctacagatatagaatagtataatataggactttcagatttagagcagttcagggctgtgaatgtagcttagcacatcatggtgcaaacataaaattaaaaacaaataaaaacagccaggcacggtggctcacgcctgtcatcccagcacttttgggggctgaggcaggtggatcatttgaggtcagcagtttgagaccagcctggccaacatagtgaaaccccatctctactaaaaatacaaaaattagtcaggcgtggtggcgcgcacctgtaatcccggctactcgggaggctgaagcaggagaatctcttgaatccaggaggcggaggttgcaatgagctgagatcgtgccactgcacttcagcctaggcgacaagagcaaaactcagtctcaataaataaaatttaaaaaacatgaatactttaaggacacaaaaatgcatcgttcctcagttcatttgtttacttatttatttactcattcggtcattcacttcctgtgtttaataatttatttcataggcgttttcttgggacccattcattatgtgctcttttttttttttttttcagacggagtctcgctctgtctcccaggctggagtgcagtggcctgatcttggctcactgcaagctccatctcctgggttcacgccattctcctggctcagcctcccgagtagctgggaccacaggcacctgccaccacgcccggctaattttttgtatttttagtagagacgggttttcaccgtgttagccgggatggtctcgatctcctgaccttgtgatccacccgcctcggcctcccaaagtgctgggattacaggcgtgagccaccgcgcccggccatatgtgctcaatttttacctggtcactgtgtgaatattgggtattatttacagttgaatgccacttctatgaaggtaagggctgggttttatacaatttataagcttaatagtgattagtttactgtcttaaaaatgtcaatatttatttggtcaatcagtgcagaaagcacaatcaagaaaaagaatttataataaatgtcctttccccaccagaaagtggaaaagtcaggaagagctaccatgatccagagaaaagggagcagatgtcagcagaggcatcaggactgggaaatcatgtgatgagggggcatttgaaggaatttcggaatcagggaagtgattttaggctgcagagcacgagtaaaggcttcttgttcagaagaaccagtgaggcatttgggtgatattgaagaagaaggtgttattcttctaacattataatttgggctccttaattttctttaagtaataaaacctagaaaattacacaactgaatttttttttcaacttagaagtggcatgaaaactggattcacgggtgaggaaagtatttgggtaggaagagaggattattatgatattttccaggcttctccctgccagaatacttggctttctggtttccattactgtacactgcccagtgtgtttatctgtaaaacagtcatccacattcattttctgagcaactataatgaacaggaaattatgtgcttagaatgagaaacaagataattgtaaaaactgttgactcaattatttcccaggcataacccctccggtagtacctacccatctttatgtctaagtggtctgccctaattagatgtatgttggtagattatggagagctaattaaaatgttgatgagaccaggccagtaaagcaagagaatgaagcaggcgtaggtggatattcttgtattgaacacctggagaaggtttgcctttgtaaacaagacacctgcttccagagaccaagctagtcactgccataatacaaatgttagtcagttgctataaattctgatattttctatgaaaagccaagagtaccatcaattgatgaatggatgaagaaaagatgatatacatacccaatggaatattatcaagaaggaaaaagaaaaaaggaaatcctgtcatttgtgacaacttgggtgaacctggaggacgttatgcgaaataaaataagccaggcacagaaagagaaatcttacttaaatatggagtctaaaaagtcaaactcatacaagtagagagtagaatagtggttaccagaggctagggatgggtaggaatgggcaaatgggagatgttgatgaaaagatataaagtttgagttagacagaaggaatacattttagtcatgttttgcatggcatggtcaccatggttagtaataatgtactgcacatttcagaaataaaggggtagattttaaatactctcaccacaaaaaatagtaagtagtggggtgatgaatatgctaattagcttgagtcaatcattccacaatgtatacatgaagtaaaacatcacattgtgcccataaatatatacaactatcatttgtcaattaaaaataaaataaaaagaaaagctagagatatgaatttcatgcgaaatcacccaatttttaaatagttatacagcactttcagccacacagaacaagacagcagccctcatttggacctaggcatcagtttggaaagttgacaggtagataaatctcaagcacttccaggaggcaagtctgtagaggaagagctggatatttggtctggaattttgtgatctttcccacatattgtaactagcccctgacttcttaggagctcttgtgtctgaaggcaaacaatacatcactaactcgatgctgtaccaagtctgatttgcaaaatttatgtcaaataagcctcctgttagggaatttgatttggcatatagctccttccagacctcaaactgtctttccagccagataatgtactcatcatacccaagatgttcactaatgctgctcaaaaagtgtgaggatccattgaggtttgaataaaaatgctaagcctactgttatgaattgggaatatttaccagctctgatccagatagtaaaaggaaccagttgtgcattgtgaaaatgctagaatgaaatgtaagcctggcattttgtggcagcagcaggatgagacctcatacagtgggcccttctgcagcttctggaacctgtgtggaaatcacagcaagagtatttattatgcattgtttctttattatatatttgtgtctttgggttaggctgattataaagacagtggtcttatggtttacaaaatgatcatttcctgcaatgtctttagagtggtgtttctcaaatgttttgaaccatgaccaaacatgaaatacatttttcattgctacctggtatacacacacacacacacacacacacactcaagcaaaattccaggaaacagtgtttctcttactacataaaatccactgtggtattttattttctttttatttcccttctagactagcctaggcgaaactaatttattctattccacttaataaaatatgtaaaagatgttacaatccattagtgcgttgcaacccacaatttcaaaatcactgctctaaaatatgttagagtttatagagatccttgggcactcaacctgactgcccaagtctaatgatgaatatatccttaaattcctgtaacagcaacaagaagagagaaaaataaaaaacaaagagaaataaaggagacagagaaagagagagggaggaagggagggagagggagggagagagggagagggaaagggggggagagaaagagaaggaaagaggaggagacaaaaggaaagaaaagaatcaatttcaattgatgattccaattctttagttctttcatttattatctgaatatctatgattaatggaggacatattaagtgcaagatgggagtagtattaggtgtctccagtgcaatgtttaacaaagcactcaggttcttagagatgccccaaaagtaaaacttagctagtccaacaaacaaataaattgtaaattggcaagagtcagggcaaaatcgacagaattgtgttctgtaaaagaagatggtataagtaatttcagggatacgaactgtagagtatttgggccaggcagagtgttatactaggatttggtatagaataagaatgcagtgtctggttcttgaaacctggaaagtctaaatcatagtgtgattcatttctctttttgtgagagttgttttaactagatcaattctggataaagctgatgtttttgctattgttgatgatgctaaatatgataaatatggtagcatttatagtgccagacactagacaaaggaatttgaatgcattcaatcatttagtagcttgtatcttcattcttccttctccacttggctggactattcttccttcacatgcagacagctctctttccacttggtcctgaatgatcctacaactagtttctttgtaactgacttcgtcaagtgctcattgagggctggttgatggagacagagtgagtagtgccaggattatgcttgctgtattcattttcgtcgaccatctatatatttccaatctttgtacagtgcactgtaggaactaaagagccaggggcatacttagctaagtatttccaaaatgtttcaaataagtactgtggattatctataagcatcaacacataatccggcatcatttctcactcctcatctaacttgagttatagtttataaaacattttcttcgtttccaggatggcttagggtcctgctcatcttatttttctacttctacctgcttagcagcttcttgtttcttttttctcccctcgtgtacttgttccttcttatctctctgacctctaaatgttaatgggccccagagttcggtttgtgaaggagaccttagctagtcttattactaagtaccatctttatgctaatgaatcccaaatgcatatcttcagcccaggattttcccctgaattaaaaatgtgtatagacaactttctacttgatatctacactaatatggctaaagggtattgtgtagaaaagagttaaaacagcaaacccgagacaatgatcttagaaaggtttgcttgaatggttgacccttggttgtcactggaagttggctttcgaagtgttcccagtcctcagttaactgataagagtgactcgctgtgtctaaattgtttgtactaaacagtgtggtttatactgaacacgtattccttttgggagtctaggatattttggtacgtgccacacagagggcccctataaaaacaccctcacaacaaaaatggggcacagagaccctaaaaaaacccccccacaaaacaaaacattgcaaaaatggccccaaaacgtggccacagaaaaaaaaaaaaagtgtcccctgggggtccacaagagaagaggagtggtgttgatgacggatttttttttttttaatagacggaatctcactctgtcacccaggctagagtgcaatggtgcgatctcaactcattgcaagctccgcctcctgggttcaagcaactctcctgcttcagcctcccgagtagctgggattacaggcgtatgccacaacgactggctaatttttgtatttttagtagagacggggtttcaccatgttggtcaggtctggtctcaaactcttgacctcgtgatctgcccgcctgagcctcccaaagtgctgggattacaagtgtgagccaccacgcccagctgaagaggagtcttagaaacttgcacctagttgcctctggacttcattccacgtcccttttccttttgtttacgttactttgtatccttttgctgtaataaatcctagccatgagtataactatattctgcatcctgtgagttctttcaatgaatctttgaagctggggacagtctagagggcccccggcacagccatcttaacaataaatgtccaaaactgagctcttgatattcttatcaccaatcaagcaaataaaaaaaaaaccatctaaacgaataaaacaaaccagcaaataataatgatttttcctacattttttataatcttccctatttcattaatggcaattttattccttcatgttacccaggccaaaaatcttatctttgatattgtcttagtcccttttgtgctgctataataaaatacttaagactgggtaatttataaaaatcagagatttatttcttacagttctgaaggctgagaagtccaaggtcgaggggcccataattggcaagggccttcttactgtgtcttcccatggcagaaggcagaagagctagagagcatgtgtgaagagaaaggaaaggcagaggggctgagcttttatccttttatcatgaactcactcctgcaataatgtcattaatcccttcgtggggaaggagccctcatgacctaaacaccgttttaaagtcccatctctcaacactactgtactggaagttaagtttccaacatacaaattttaggggacctattcaaaccataccagtctgtttctggcccaatttttgtccttctcacaggcaaaatatattcattgcatcccaatagctccaaaagtcttaacttgttctagaaaataaaaattaagtccaaagtctagagtctcatctaaatcagatatgagtaagatcaaggtataatgcatcctgaggcaagttttctgtaagcccatgaaactaaacaagtttcatatattttcaaaatacaacagtgggacaggcataggaaaaacattcctggctgggtttggtggctcatgcctataattccagcacactgggaggctgaggtaggaggatcacttgaggccaggagcttgagaccagcctgggcaacatagtgagaccctgtctctacaaaaataaaaatataaaaattagctgggtgtggtggcacatgcctatataggtcccagctactcaggaagctgaggtgggaggattgcttgagcccagaaggtcaaggctgcagtaaaccatgtttgtgccactgcactccagtctgctaagtgacagagcaaggccctgtctctctaaaaacaaaacatttccattttaagaggaagaaataaacaagaagacaggaataactcatctccagtaagtccaaaacccaagagggaaaacaatattaaatcttatgacaccagaataatctcctttgactccatgacctgaatcctgagcacactggggtaagagttgggcctgcaaggcctcaggaagccttgcccctgtgggttttcttggctcagtctaccgagcacctctcacaggttagagtatcatgcctgcagcttatcaaagctggagttgcctgctggtggccctacagttctgggatcttgggggctgccccactctcatagttccactaggcattgccttacaggggactctttgtggtggctctgtccccatgacaagtctctgcttgggctcccaggctgtccaagatatcctttgaaatttaggtggtggttgccatggccccacagctcttgcattctacaaaacctgcagaattagaaccacatggatactgccaaggcttttggcttatacctcctagagtggtggattgagctgcacgtgggcctacttgagccacagctggggcagccgaggagcgctgcactggaatttggggagcagagttccaatgtgcaggtcctcgaatgctgaggtcctgcagatgtctctctggaaaccttgacctcaaggttttagcttgccttgaaaatctctgaaatgcctttggggtcattctcctattgtcttgatgaacagaacttggcttccttctagtcatattagcgtctttagctaatggttgcttggctacacccttagtgtcctcttctaaacaaaattttttattcttacatggtcaggctgagagttttccaaatctttccattctgcttcccttttaattataagatctgcttttaagtcatttatcttttatctcattttattgtaagtggcaaaaataaaccctgcagcacctgaatgctttgctgcttagatgtttcttctgccagatattgtagttcattgctcttatgttctactttctacaaagtcctaggacatgggcataattccaccaaattctttgcaattctataacaaggatggcctttactccaattttcaatacttttttttcttatttttatctaagacatcatcagaaaggcctttactctctgtatttctaccaaaattctgatcacaaccatgtaagtaatccctaagatttagtctctccctatagcctttgtcttcttctgagccatcaccagaatcacctttaacgctctgtttatggcaacctaggcttttttctaggctgctcttccaaatttttccaacctctacccattactcagttccaaagccactttcacattttcaagtatttgttatagcaacaaccctcctcttagtactaattttctgtctttttcccttttgtgcaactgtaacagaatatctgagactgggtaatttataaagaatagagatgtttttcttcacagctctggaggctgggaattccaaagtcaaggggtctacatttttttgagggcctttttaatgtgtcatcccacggtggaaggcagaagggcatgaaagcacgtgagcaagagagggaaaccactcctgtgataacagcatttgtccatttgtgagggcagagccctcatgacctaattacctctaaaaaatcccacctttccacattgttccattggggagtatgtttttaacacataaactttgggagacattcaaaccatagcaacatctatttttatcacaacccacacctgctctgtcagcacagcctgtagggccaggttctaaatataactagaattcatttcgttttcaccaacctcactagtacaacaggtcctaactgttcacctaggttactctcaaccatctattttgttaaagaagtcaggaagcatgaatcagattatttaaatcctctgctcaccagcctctaatgcttattcattgcatttctgagtaaaaacccaaatcctcactatggtctgtctgatctggaccactttaaacttcaccccacactctaatgctctctctgttgtcaggcctttcctgctatgcctctatgtaaaccaggcagacccttccctggggttctttggggctttttaaattattgtttcctctgcctgaaatgttcttctctgatagtcacatggccagatccacccttcaaatgtcatgttctcaatgaggaacctcctggctattctatctaaagttttccacagccaacagtttttatctcacatcctgtgtttttctcttagttatattttattatctaatatactgtatggactgaattgtgtcctctccctgccaaattcatatgttgaagctctaatccccagtgttaaagataggactttaaagagataactaaggttaaaataaggtcataagtgtgggattctaattctatataattgctgtccttgtaggaagagggagagataccaggagcacacacacagagagagaacaccacttgaggacacagttgagacgacgaccctctgcaagccaagaagagaggcctccccagaaaccaaacctgctgacaccttgatcttggacttccagcctccagaactgtgagaaaataagtttctaggtttaaatgactcgtctatggggctttgttcatggcagtctgagttgactaatgcatacgctaaccatttcatgtacttattttgcatactgcctgtcttccttttagaatgtaaacttcacctggagaggaatttttatctgtttttttcaccactggaattcttagtactgataaggtgccttagctgtagtaagaatcagtactacttattggaatgaataaccaataggtgagaaacagtcctggtttacactgctttcttttatctctgtggtagactaattgcaaaaatggctctaactgttcattgctcttttacatgccctttgccatgtgtctttgcagctcttcctatacaaaggtagaatctgtttttttttttttttttttttttgagatggagtttcactgttgtcacctaggctggagtgtagtggtgccatcttgactcactgcaacctccgcatcccggattcaagagattctcatgcctcagcctcccgagtagctgggattacaggcgcctgccactatgcccagctaatttttgtatttttagtagagagatgaggttttgccatgttggccaggctggtctcgaactcctgatttcaggtgatccacctacctcagcctcccaatgtgctgagatttcaggcgtgagtcaccatgcccagcccaaaagtagaatctttatcctcttcctttgaatgtgatttggctttttgactcacctttgccaataaaatattgcagaagtatcagtgtgtcagttccagacctaggtgtccagaggccttacctgcttccattctccttcttagaactctttgtcataaaagcaatcctaggctagcctatagaaagacaaatgaccatgtgaaaaagagagaaattatcctagctaagataattctaaaccagtcagcctccctgctagttgaccacagacatacaatgagacaggattaccttagccaactttagccaagaccagtaaagctgcctagctgacccacagattggcgggcaacaatacatatttattattttaagccagcaaggttttgcagttttagctattacagcattatagcagcaatagataattgtatctgacagtggtcccaaaaagtattttgtgtttcagagatgtctcttctctttaagtggcagactaacttaaaagaaagcttatgggctctggaaccagattgaattgggttcaaatcctagctgcaatcacttaccatatgacctagtgcaagttacttaaccttttgaccttcgcattatttgtaaactaaagatagaaatacttgctcagagcttttgtgagacttaaaagaactctcatgtgaagtacctgatacaactactgatattgatctaaaaaacatcacaaattttcccttataactactctgtggctgaatcatcaatagattaatctaaatgcctgtagaaagtctactttttgtcttattagacagaaattattaggcatcagcctggtatacttgctattgactcttcaaagctgtactttcttttagtcattctaactgacagttttcaactttaagggatggccttaaagccgataaagtccaggttttagtgactcgatttatttctactgtatttgtacccttcatgatgtcattgagttaggccagaaggcttctcagttttctatatttgaacaaaagaggcctaatttccaaacatcaacatagaggagagtgaatgctcttgattcagtgccatatacctggaaaataactgaggtattcccagcagctgctggtagcctccgataagtccaagtgaaatatgggcatctaaatgcaaagacagaggccctgtccattcaaagtcccacaaatcagcctgtaaatatgtaggcagctatgtgtttgaatatttattcttgtattttatgcagcttcttcaataagaattagagaagcaggttaaatttgatgcaatgtcttaggcattagattcaatttagagaaatacatgctaaagagaaataaggtttttttaaaaaaatttactttattttttaacaggaaattagcttaagcactgctttcaggtaaaaccattctataactgacatcatttttaagtgctctatattgattaaacactttagctagatttgtaagtctgatcagaaaatatgagttgtaaatcacgatgtgatttttcctttgatcccatttaaacattttctcctttggatcacatgataacttctgataaaattctggaaactaaaatccatttaattggtaatgatgtttcttgtgaaaacgcttaacacacaattttgttaaaatgcaggaacatgaatgtattggtatctgcttttctcaagaataaaattgatttcttcatactaatcatctcttcaataaactgtccctcttctagtcaagtcattaaaatgattctttctcagacactttttgatctaagttataactgtcattttagaaagaaaatttcaaaatgattaagattttttgtttgaaaggggcttgatttctccttaacactttactaatagaatatgaagtgaggatcccaaggcagcttacatatttctgcagttttgtttattatattttctgaattcagataaatctgaacaggcacctataaaacctttaaatataagaacattcagtatttggaatacaacaccacattttattgtggcaatgcagacattgtaatggtttgggtttctatctctccaggcctggtggacaactgagaagaagaattgatcgtagagtggatgagtgcagaaagccatttcgtaaggtgatatttgatgcctgcattacatgggactctacattatttctctcttctgggtctagatttcataagccactgctttcaagtagactgaagttgggaacatattatcgactattatgaaggctaatattctactaaatataagtaccatctaaagatgtggaacacaggtgaaaagttggcattcatccttttaagtgtcctcctttcacaggtgaagtgtgtagcctaaggttatgcaactacgcagtaaaattagcagtagatcccaggtgttcttattccctggactggtgctttttctactctatgaaaggaaaggtagttttgctagtgggtaatttggagcaaggagactcctaagtgaaggagtaaagaggttggagggagaggcagggcagtctgctcttctcccacccctagtgttgcctacgtttctgctctagggatgtatgtttaacaaaaacatcaaaggtggacttgatcaatggactagagagctgaaagttttatagaactttggcaacccaagggagctacagaaagaggagggtttgtaagctaatggcaattctgttttatctctatcatcttacctcacagcagtcataggcttctctctagcccatccaccaaccccacacacatgcagtataactggacagccccaaggtatctataactatgccctaggtagcccactcccaagcttgaattttctttgggaaaatattcccagttagaacattttgggttgcccttatcttcagcaagtctcaatcccaatgtcagttcaaagtatcagagataattagcagaactcagtttaggcatgtataaggaatgagcaatggacaaagggcattgtctaaaaataatcctatttttgtcagagaaagataaaccagatggaacaaattgggaggcaagtaatattttaaaaatcattataacacatatagtaaaaataaagttcagactatgatacaattgtaaaataaaaatgagtctttttcttaccctgcattccagaggtaaccatcatttactttcttaggcatccttcaccaaatgttccatgtgtattcatgcatctatgtatcatctttctgtctgtctgtctgtctgtctgtctatctatctatctatctatctatctatctatcatcttttctttttttttttttttgttttaagatggagtcttgctctgtcgcccaggctggagcgcagtggcacgatcttggctcactgcaaacaccccctgcaatctctgcctccgggttcaagcaattctcttgtctcatttgtgcctcagcctcaggcatagctgggattacaggcgcagttcaccatgctcagctaatttttgtattttcagtagagacaagatttcaccatgttggccaggctggtctcaaactcctgacctcaagagatccacccacgctggactcccaatgtgctaggattataggcatgagccactatgtctggccctatttttttaaaaaataaaagcaaatgggagcttactattcccatgttttttttttttattatactttaagttttagggtacatgtgcacaacatgcagggttgttacatatgtatacatgtgccatgttggtgtgctgcacccattaactcgtcatttaacattaggtatatctcctaatgctatcccttccccctccccctaccccacaacaggcctcagtgtgtgatattccccttcctgcgtccatgtgtcctcattgttcaattcccacctatgagcgagaacatgcgatgtttggtttttttgtccttgcgatagtttgctgagaatgatggtttccagcttcatccatgtccctacaaaggacataaactcatcattttttatggctgcatagtatgacatggggtatatgtgccacattttcttcatccagtctatcattgttggacatttggcttagttccaagtctttgctattgtgaatagtgccgcaataaacatacatgtgcatgtgtctttatagcagcatgttttataatcctttgggtatacacccagtaatggaatggctgggtcaaatggtatttctagttctagatccctgaggaatcgccacactgacttccacagtggttgaactagtttacagtcccaccaacagtgtaaaagtgttcctatttctccacatcctctccagcacctgttgtttcctgcgccattctaactggtgtgagatggtatctcattgtggttttgatttgcatttctctgatggccagtgatgatgagcattttttcatgtgtcttttggctgcataaatgtcttcttttgagaagtgtctgttcatatcctttgcccactttttgatggggttgtttgtttttttcttgtaaatttgtttgagttcattgtagattctggatatgagccctttgtcaagtgagtagattgcaaaaattttctcccattctgtaggttgcctgttcacgctgatggtagtttcttttactgtgcagaagctctttagtttaatgagatcccatttgtcaattttggcttttgttgccattgcttttggtgttttagacatgaagtccttgcccatgcctatgtcctgaatggtattgcctaggttttcttctagggttttgatggttttaggtctaacatttaagtctttaatccatcttaaattaatttttgtataaggtgtaaggaagggatccagtttcagctttctacatatagctagccagtttctccagcaccatttattaaatagggaatcctttccctattgcttgtttttgtcaggtttgtcaaagatcagatagttgtagatatgtggcatgatttctgagggctctgttctgttccattggtctatatctctgttttggtaccagtaccatgctgttttggttattgtagccttgtagtatagtttgaagtcaggtggcgtgacgcctccagctttgttcttttggcttcggatgactggcaatgtgggttcttttttggttccatatgaactttagagtagttttttccaattctgtgaagaaagtcattggtagcttgatggggatggcattgaatctataaattaccttgggtagtatggccattttcacaatattgattcttcctacccatgagcatggaatgttcttccatttgtttgtatcctcttttatttcattgagcagtggtttgtagtgctccttgaagaggtccttcacgtcccttgtaagttggattcctaagtattttattctctttgaagcaattgtgaatgagagttcactcatgatttggctgtctgtctgttattggtgtataagaatgcttgtgatttttgcacattgattttgtatcctgagactttgctgaagttgcttatcagcttaaggagattttgggctgagacaatggggttttctagatatacagtcatgtcatctgcaaacagggacaatttgacttcctcttttcctaattgaataccctttatttccttctcctgcctgattgccctggccagaacttccaacactatgttgaataggagtggtgagagagggcatccctgtcttgtgccagtttttaaagggaatgcttccagtttttgcccattcagtatgatactggctgtgggtttgtcatagacagctcttattattttgagatatgtcccatcaacacctaatttcttgagagtttttggcatgaagtgttgttgaattttgtcaaaggccttttctgcatctattgagataatcaggtggtttttgtctttggttctgtttatatgctggattacgtttattgatttgcatacattgaaccagccttgcatcccagggatgaagcccacttgatcatggtggataagctttttgatgtgctgctggattcggtttgccagtattttattgaggatttttgcatcgatgttcatcagggatattggtctaaaattcacttttttttgtttgtgtctctgcccggctttggtatcaggatgatgctggcctcataaaatgagttagggaggattccctctttttctattgattggaatagtttcagaaggaatgggaccagctcctccttgtacctctagtagaatttggctgtgaatccatctggtcctggactttttttggttggtaagctgttaattattgcctcaatttcagagcctgttattggtctattcagagattcaacttcttcctggtttagtcttgggagagtgtatgtgttgaggaatttatccatttcttctagattttctagtttatttgcctagacgtgtttatagtattctctgatggtagtttgtatttctgtgggatcggtggtgatatcccctttatcattttttattgcatctatttgattcttctctcttttcttctttattagtcttggtagcggtctatcaattttgttgatcttttcaaaaaaccagctcctggattcattgattttttgcagcattttttgtgtctctatttccttcagttctgctctgatcttagttatttcttgccttctgctggcttttgaatgtgtttgctcttgcttctctagttcttttaattgtgatgttagggtgtcaattttagatcttttctgctttctcttgtgggcatttagtgctataaatttccctcttcccatggctttgcaccttggtccagcgtctggcttgtgaaagacactcaacgatgggcccggcgaggtagctcacgcctgtaatctcagcagcttgggatgctgaggcgggcagatcacaagatcaggatattgagaccatcctggctaacatggtgaaaccccgtctctattaaaaatacaaaaaattagctgggtgtggtggcaggcgcctgtagtcccagctgctcgggaggctgaggcaagagaatggcatgaacccgggaggcagagcttgcagtgagccgagattgcgccactgcactccagcctgggcgacagagcaagactgcatctcaaaaaacaaaacaaaacaacaacaacaacaaaacactcaatgatgttatccatcactattacctgtggattttggctatgtgtctgaatcttctttctgatctaagacagccgttgtgtcctgtattgtgttaatttctctcagtcgcctgtccatcacttacttccaacagtcatagtattcgaccctttataaaagcgaaccttggcatgctttaaagcagtggtctcagccctgactgcactttagaatcacgtggggagcatttgaaaactactgatgcctgggccctaacccagattaattaaattagaacttctgagggtaggtcccaggcatagctggtcttttaaagctccccagcagatagtaaggtacagccaggttatgaaacactggtccagagattcagcttgtaagaatcactttggatcccaattctggtttgtagtgttttagcagtgttatgcataaatttgataaccatgcctgctgatttcttctttcttgtcatgggcaagaaaatctctgttaattgttcctttttgttttttgtttactttgtaattcaactatttttctctaaaattaaatattagaagttctagtcaaattgaaggttttggggtgaatttcattctgtacaactgaggctttatgtattaagaaaacagcatgatttcaggtggtcaatgtgcttctatggccatagcatcagtttcatttacaatgattcctcttgatctctctttctccttctcttgatgaaaatttccatgctaggtttccatcttttcactgttttactctgtcagacatatgcctgcataaacattacccagccatgataaccaaattaatgaaatccttaccagggctttggatcattggtcatttttctaggactaatagatttacttgcagtgtatattgtctgtgtatattatctgtgtaataccaggaagactttccatgggcagccatttaaagtgagttaagaatatttaacatgatttttttttttgaaagagaaagtattttggcaaagttgttcctggaggagtcacatagacagtatcgaggcttcatatctcctttatctatgatctcatgggaagtcttgaaattataatagagcaagttctgactttcacaaaatgctgtttctgaccatagtcattttggcagcatatacgtgaatgtttcacagtggtatttcaagtcagattggtgagcggctaagggtgactgacaaattatccctaattgcagaggaattactaaggcactgttcatacagtgccatgtactcttttggactgatttggaagggacaatgaaaaatgtggcagatgacaactgaggcctgaaaatggatgaaggggctgggtcttagcattagactggatttttttttccccaaaaatactaattcacaggattcccttggatatcaagttttctctcacttctttacctccaaatgatttacaatcaagggatcagttttattggttgcagcagagatctcagccctatcaaatcaacgtaccatttttcttttacttttaaaattgacatataatgattgtacatatttatgggttacatagtaatgttttgatgtatacaatgtatagtgatcaggtcaggtaattagcatatccatcatcttgaacatgtatcatttatttgtgttgggaatattcaatatcctccttctagctatttgaaaccatatattattgttaattagagtcatcctgcagtggtataaaacaccaggatttttcccctatatagctttaatacagctttaattttacatcctttcacaaatcatgccatttttaataagaaatattgtgtaaagtcctctttactttcctgaaatgcatatatgtgtgtatatgtgtatatgtatgtataaataactacacattaattaaaagaataattataatgtcttagatgtcctacaaaaagaacaataaaaggaaagtaatttggtgaacttctaatgtctttcaatacataaatcctcaggcaaactcaggaatagatcttagcatacaaaatgaatagtcattcctatagtcatttctatccatggaaatactctgcatgtagcaaatgcaaactagtacagggatgttggttttgttacagactcaaagaccaagagtgatgtttctgtctaagtgaacaactcttggcagtttaaaatataatagaatccagtctcccctttgtttatgtaatggttggattccaggaaaaaacaatcatgaatattaacctcttgcaaacatattactgtttatgagcaaatgcttagaattgagtgtatccacccataagaatggttaaacaaaaacccaaacctaacaataccaagtgataatatagtacaatagaattctcatacattgctgatgggagtgtaaattggtggagcaaggttgactaaagctgaatatttgcctgctccatgatctaacagccctactcccaagcatgtacacttagcagcaagcagcatacatgttcacagaaaatatgtggagaaatgttcatagcattcctaaatgaaggcaagtcattgtgtctatcactattagaataacaatttgtggtatatttatgtaatatagaatatgctataacaatgaaaatggaccaaccataccactacatgcagtaacatgggtgaatctcacagaaaaaatgttaaacaaaaaataatcacaatagaatacataatgaatgatgccatttgaacaatttaaaagagggaatctaatctgttgtgagagaaataaaaatagtggttaactctagggggaagaaagaacttggaatgtttctagagtgttggtcatgctctatgtagtggtctgggcggtggttacacaggtggttccatttgtaaaaatgtatttggttatgtaattaaaatatgtaaattttactttaaaaaacatttacaaaaacaaaacagaaggttcatctctgtacatgtctagtgggacactcttttgaggtagaaatattacttcgattgcaagacttctgtcaccttgatttctgcatactaaacacctgtattattacaactaaaatgttggcacaaaatgtccagctgtgtcctaggaggcaaactatccctgctggacactaggtttgagacgtagtctaaagaaaacttctcaaatttattattttctcatctttaatatttgatttgccttttaaatttaaataaatatatttttaaacaaatgttattgtatgcaagtcaaaaaatcagtcttatttggcacgaatagatataaattttaaaaacaaatgaaatgacacaacaataagccagtactgtcacacacacagcctcctagttagctttttttttttttctggaatagtgttaaccaatattaggatattgatggcagaaagattcatcaagctgagactttctaattgacataaccaaaaggtttgaaaaataattgcaagaattctcactacaggactttttaaaatattacaatttgttatgtggatggtgagctgctatacttgtatgtatcctcagccatcctgccctttctgggatctctcatgactattaaaccattaaccttggtgtctctccctaggtagatagatttataatcccctaccctagctttgcagaaaatgatctgattattttctaaagagtgaaccaacacactgttaatttagtagttatacctggttggcatgagtgagtatacgctgggggatgagtgctgtagacccaagtctgcctgctaacgtggccactgcaaagaatgctaggaaaactaatacaaagaaataaacaagacttctctaattctgtgttgatttcaggtaagaaatcacaatcaagaacttcctccatagagacaaaggttataaatgaccatatagaacactgattcacctgctctcatttttttttttttttggtgctcccaatttcagagatgtatctcaacatagtgacatgattcaatatgatttaatcctgtatatggataccataaaaataatcacatgaattatcagaatcaggtgtaatacttctgtaacatgttggaaagtatgactctagaaaaaatggtctaagttcctgttatggtttagatctgtgtgcccatccaaatcacatgtcaaattgtattccccattgttggaggtgggtcctgatgggaggtgattggatcgtgggggtgaatttcccccttggtgctgctatattgatagtgagagagttcttgtgagatttttctgtttaaaagagtgtagcatctccccttctctctcctgctcctactttggccatgtaagacatactggcttgtctttcaccttctgccatgattataagtttcctgaggcctcccgagaagatgagcagaagctgttatgtttccacttcctgtgcagcctgcagaaccatgagccaattgaacttctttactttataaattaccgaatttcagatatttctttgtagcagtgtgagaacagactaatacagctccaaaacatatgggagaaattacttcagtattaggttaaactacatacagttggagtttctgaagatcaaaaatattcaactgttggcaatttcatatttttcaaaataatagcagcaatggtcacgaatttatttatatacaaccataatgcagtgtggtcctgctgatggaaggaaaatcagactatgtgtcatgatccaggaacaagctctaccgttaaaacagtgtaatattgggcaaattagttctccttgggtacagtttactcttgcatgtggagaaaacattaactcgatttatgtttcccaaatgtgcactatcagcccctgtgaggctgtggcattaattaaataggttattgaatttgtgtgctcatcaaatattttctgtagaaataaattatatcttgcacatgtatatttgattccatgatgataaatgagtataaatcaatgcattcaatttatagtagaattttataatatcattatctattttataatttataagttttaaaagtataactatgaaatttaaagaatagtctcactttgttgggggtctgttttcagcgttaaaagatgtttaacgctgaaaacagaccaaatgcatgccgggcttaaaaacacgaaaacattaaaaacttaaaaacatgaaaaacatgaagatgtttttcccatcttcatctgataaaaaataatattaaaaaatactttgagcaacaagggccaattggaactcagaagagggaaagaacaaatcaaggttgaagccagaagtctctctgtttattgatatgatgcctggtaaatactttcatttggacaaaatggatcatggaaaatagactagggttatactctcatagaagttggataagctcaaggtgactgagattaagtctagagagacagaacaaggccaatctggaagataaacataggtgtggctttttgaatttaggattgaatagagtcaaatgaaaaagaagtcagttcatgctttgagaatgttatatggccaaaagaatccccagttttgattcaatatgtttgtgaatatttaaaacttaatatgatctttggagcttcagtattctacaaagtacatagcagactgagaaggtttttcagccttttattaagactctagtgttgtcttcatttggaatcaaggataataaaaaattaagggattaccagagagaagagccaagaattcccactggggccttctaattcccaaaccctagaatagtgggtttttgcaacatgatttcagaattgttttagacaagtgacggtgggtgcctccaattctttctgtatagggttgtttattgcaattcttctatccctcttctaccttgtctgttggttgtatgaggagcatacaacttgtctctttagttcagagatttccaagagaagagaaaccacatcttcagtccagataggactgaaggtacaggaagtcacaggatttgagtcttatactgcaattatatgagactttgtcttttttttccagggaaaatgaatgaatatattttagggacataagggaagaaaatgtatatttatgatgcagaaaatgatctttggcagattgtatatttctttcaattatctgctgctctcctgcgagattattatcttttcttctcctttagagtcaggcttagtcatgtgacttgctatgagtgttatcctgtgagtgtgccatttttttctctgctaccacaagaatagcatagctcagatagaagctgttgcttaagcctgtctatcatttatccagcctatcattgacgggcatttgggttggttccaagtctttgctatcataaatagtgctgcaataaacatagggaatatcatacactggggccttttggggggtggaggtcaaggagagggagagcattagaacaaatacctaatgcatgcagggcttaaaacatagatgatgggttggtaggtgcagcaaaccaccatggcacatgtatacctctgtaacaaacctgcatgttctgcacatgtatcccagaacttaaagtaaaataaaaaagaaaaaaaactcattggcaggacacacattaacattataatattaagatatttgcatagtccattaagctatacttaggactcatctacacaagcaagtcaaatagaaaatggaagcaattgcctaactaacttctgatatcccttgctttagttatctagatatttaaagggaaaaaattcttaaattattcatttttactttcttggatttcaagcttacttaggtatggacttaatttcaaagtttcctaatttccacaaaagacaatttgaagtaagataactcttggagtggaacaccatataaaaatggcctctttcttttctcacctgagaacagtattccagtgaaatcctgactaactagaaatccttgcacagggttcaaagccacaaatacatcatttcatgaaatagtcttaagttatcacacatcactgccaacttctgaaataatacagcaggaccatgttgtagtgtctgacttggagatatcatttaatcgcttttatctcccatatgaattgtcttgtttggtggaactaccataaccactcttttctctatgagttaatgagcctgatgtaccaggtttttttgtttggtggtaactgtaatttgagcatactcaaactcaactgccctttattaaggcagaaggtctctgctccacagctgaatctgaaagctgtttgggatgatattctgtccttataataacttctggtatacagaaattgccacttggcccgtaaaatgtttattggaggaaaaatgtagacacacgtatcagttttttttcccatcattcctattcgattattttaacttaattgtcccaccccctaaaaggtaattttctttctgttggcttcttcacattttaaaataaagttgtagcaaaatatgttcaagaatccctggctgtccagagaacaaagtttttatgacttattttctgaatgagaaaataagagaaagaaaataaaagaaagaaggaaagcatattgtgtctcaaaaacagaacaaattttccctagtgtttgagtataattttttttattatagttgtgattcaaatggtgatggtgaaaacagggtcactgagcttcaagaaagccaagttctgctttgagtttctcaactagctaagggcataacctggggcaaatcttttcatcttttaatttctttatgtacagattaaaacctctagaccagtactggttatccctgtttttaggtgcagcattagttatctctgttttctgtttcaggtcacctaggtttcaaaagaaatcacttcaggaagaggtatcattcagtgtaaacaaggggcttatccagtgtatgtaccaagagacagactgtcttcatgagtatcagaggtgtttctgtcaaaactgccaaaaaatttagaatataaagaaaatctaactattttctaagtataaggcagtgttgaatgttccaaatgctgctgggagtacattgttactttaatttttttttttgagagctcagcaacccttgttggaaacctcttaaataaccttttcctggctccattttaattttgtttttctcagccctagaattgtcagccaccaagcatgaaatgtaagggttctttttttgtaaaacattttaaaggaaatatacccattctgaacatttctggagaaaatgacctcttacctacagaattaccaaggcatttgtggtaaagatgtattcttttctcctggagccaatttggtatattttgatttatgcctttgacatgttttaaaggttaggaaaatgttcaatgtgtttctgcttctaaagttaaagtagtcacttcctcagatatggctgcttaatgttcaatcctcttaaaaaataatttgaaggctggtgttggtgaaggaacaagtgcagtttttgcattaagtgtattaagcagagctgctgctgacacaaataaaatattgtttggggaggctgaggcagctttagggaaagaagtaaggcgagggtgggaagtgcttgaaaagtcaagtcctttctctttttcccttctccctgttgggctgaggatcttgtttgacattcagaagatgggtaaaataagatgcactctgtaagccacagctttatcaggaattttcattattcacttgtgcaaatcaggaagaaccaagcaggaagaaccaaggagcctaagtgagagctgtgctcttggatttttaacttccttacattatgaaaatcaatgatgagtttaattgaactaacatccaaactgtaccttgagtttgactggcattgagtccagttatgaagatgtggtgacacagaagagaagagcactagaccgtgctctgtccctttgggctaatccacactaggcaagctaagccactttagttttttctctctctctggctctcattttcccactctgaaaatgaaggttttggactagttgttttttagggtgccttttgtgccacttctcagtttgtttttgtttctttactcagcatattcttcttgttttcttgacctctagaaatttcctgacatcctgccctctcatgttggaagaaccatctagtgaatggttacttatcgctactttcttaaggtacttatttttttgtcattgttgtgtattctatttttaatttcacttttaaaaccataaaattttgtaattatcaatttatgtcaacattaagctagatttacctacatttttatcatgtctttgctctttatttcttcttatatttcaagctgtccatctgtaattatttttcttctgcctgacatctatgcctgtaaacaattttctttagctaggctccgctacaagttttagcttgcttgaatatgtttctagtttgtctcacttttcaaaatcatttttggatataataatcttgattagtagttttcttttaggacacttgaagagattccactgtccactgtcttccattgttgttctaaatgtgtcatctgtcacttataaatgctgcttctttgaagtaataccacttctctctagctgctttctctttgtctctctccctccccttctctccttcttaatctgcattttcatgacaatgtgttcagatgtgggtttctttttatttatttatacttatcgggtttcaccagatttgttacatttgtggatagctatttttcatcactcataaactacctgagctctcagctcttcaatcattttttctgctctagtttcacctctttacttctataaatatgattatttgtctgacagcaacttttcattcaattcttcattcttcatgcctcttaatctcttttgtcgtattttccatctcattgtctctctgtgctccatcctgggtaattaatcctgatctgcatttcagttgttcagttaacttcataattgggttaaactaccatgacttaattaatgtgaactgtgctataaatatttatgcattggtttatggttacatctttcagaattttattttttatttaggtctgttcagtgccgtctctcctgaagggtaataaatggttgaggagaatttacttttgcatcagacttttgtggaacactttgggattccagctttatgggtgttgaaattgttctactaggcaaaattgttttagcagagctagggctttgttcctcatgacaaaaactaaggttcatatttaccatgttgggcaaaatcctgcaggccaaaccagttttgtgtttccatttacctttctttgttcttacttttcttaaattttagtcatttttagatattgtctggtctcaacaccttaaagaatgtgtgtgtgtctgtgtgtgtgtgtgtctgtgtgtacatctttataatactatcttatggttttatattgtatctttcacttctagttgtttttggtagaggatgaaaaaagatatctagcccaccatatttctttccaaaataatttgtctctcatttgttgtttgtgactggtctctactgaaagtcctcctgactcactagcctggctttcttcatttccacttcaggctctactttctatttctggctacaaggctcagtcgtcaccctacctcttcatctgcctctgcttcccagggaattgtatctaatcccaaggtcttacatatcattcatatgctaataaattccaattttatatttacagtctagactctcgctgattctcaattatatttttaatcatttattaaacagtttcatttgggcatttatttgttttctcaaattcagaatgtttaaaatgaaactctgttttattcattccaattttattttttcatcttaattccccatttctgaaaatgctgccaccattttctagacttgattagccctaagacctgtaagtgagccttgatttttcctcttattgataacacgtctagatccatctggaaatgctcttgttccacttctcagatagacaggtgctcctcaacatacaagggattatatcctgataaaaccactgtaagttgaaaacatcaatgtcaaacacatatactacctcataaaaccatattatagttgaaaaattataagtcaaaccattgtaaattcagatgctaaacttactatgaggctacttcctgataaaaccattgtaaaatcaaaaaattgtaagtcaaaccatcatgagtcacggatcccctgtatctgtaatctgatcattttttaccatacccactcctaacatcttcatccaaatcattgtgatttccagtgtgatccagtgtgaattctgcaatagtctcccacctctgtctttgttatctcacttccttacccaccaatataaataaataacataatcagatataatataataatatattataaatgatataaatcagattgtttctgtcccgcatttataacctcagatggcttaccatatcattaatatatatatttatatgtatatatatttttatatatataaattttatatataaatatatatcttatatatatttatatataatacatatatattttatatatataaatatatatacatatttaatatataaatacatatgtattannnnnnnnnnatatatataaattatatataattataaatatagaaataaatataaatataaatatataaatatatataaatataaatatatataaatataaatatataaatggtataaatatataaatataaatatatataaatatgtataaatatataaatatataaatatataaaaatatatatataaatacatatataaatatataaataaatatatataaatacgtatataaaaatatatatttttttttacctgcaacaatatgccaattcaaccacttaatagctttcaaaactctgaccaattatgtaatttcgatgctcttagctttttttctttttaaaattgtagtaatgatagcaactatctggggtgatgtggggggagttgcatgttgaaattaacttatacatttgaaacaattagaaaagtcactggaacgtggtaagtgccctattaatatttcattgctattacctgaaaatattgaatttgtttacttatttgtttaatttctgtatacttcactaaaatataggtcagtagctcaaattatgatattcctcattgtcctctattgtcatatctactgcatagcaaattggaggtgctcatttaagacttaatgcctgaataaatttgatctcccactcattcttttattagacacatgttgagtaagtgtccactatgggcaagacgttgtgctagcttttggaactacaaagataaataagtctccgtctttgaactagtggggctaattctgtcttgaaaagacaactaagcagagatctcattgaggtgcaatgtggtaagtgctctattaggagaaatctctggtaattcctgaagtctggtgatatggaacaccatttggagaaatacttgtgctttcttttagataatgctttacattataagatcgactcaacattttggcttctggaagttatcatggataggttagaaagagatgtagaatcttggttatctagctctcctggatcttatcaactttctgcaatgaatggaaggtgaattggtgaatccacagacataagactattccactgaatttaatgaattggaaaaaatagcctgaaacaaaaggaactgctattttgagagtggctgcattgtcctccacagcataatgatcatggaaggtcaatacttcaggttatgatgaaggtacttttagttaagcagagacagagcaatatccttgagagagtttttctttaaagatgaaacaccttactgaacttccactggagggactttgaaacatattttaagtaagaggaagaggacagcaatcatggtgtgaagaaacaagccagaattttgaaaaaaaaaaaaaaaaaggaaggattgacttctagctgcttgttatatcaggattctccagagagacagacctgataagatgatagatagatgatagatagatagatagatagatagatacatacataaaggggtgctataacaggaaaatttcctcatgttattatggaggctgagaagtctcaccacaggccatctgcaagctggagaccctaggatgccagttgtgtggctcatccaagtctagaagcctcagaaccagtcaagttgatggtgtaattattggtttgatactgaaagcccaagaacctggagaaccaaagggacttctggtgttaagtcttgcaatcaaaaggccagaaaacctgaagttctgatatccaaggacaggagaataagaatctcccaatttcaagatggagagagaggaaaaaaaaatcacattttccctgctttcttcttccatttgggcccacagtggatgggatggtgcctgcccacattgagggcagatcttccccactcagtccaccgactaacacaccaatttcctctagacacacctttacagacacacccagaaatattgttttaccaagtctctaagtattacttaattcagtcaagttaacacctaaagttaattagaacaattccaacccctatcaaatgggtacccatattcattcctcagaccatgcttaatctccaagtaaagacaatagtaaggtaaatagtttcacctaacatgatagaaccaccatatgagcagcccaaaatgcactaatcccttctcaagaagaggaggtaaagaaagaccttgggtaatgtttattcttctcctgagatcgtataacttaaatactatgatataaggttaataataatagtatatcttatgttagatattgaaggaataagggagaaagaaaaacaaagatacatgctacacacatacacacacacccacacacacactcaatgtattcttaacaaaatagggaagaaatgctcatgacaattgcagtccttgtttccataactggttcacctggttgtaatgtaaggtatttataattaccttcttccactacttattctgtattctctgtgtcttcagcaagcaccttaattagttgtgattatttacctagtggggtgaccaaaacctttgtttctgaagggtctgggtcattcgtagtccttcctggattgggttgttacagtttcccattgaccttaatcacagagtatggtaaaacaaaaatatgacctaaggaatctcctgtattccagacacactcttccttacctccatcgcggagtagtagttcaatttcttcttggtagtctgaaacaatcaccccagccaacactgttacttctttcttaactttttgactcaaaggcacgaggaactcaaagtggctgggtgccagtcttaacttccagttccataaaattattgttatgtcttctggtggcagcatttctctctctggaagtaagacatctaatctataaagtcgtgtaaagttgcaggaataggatacaaaaactttgctagtgggtcactagggataacggtgagttctgtcatgcccatgtctccctttgattcctggaccataaatcttgactatgccatacatttgacactgattcagagtatatgcagccttttggagaaccttgccccaaccctgcaaagtattatcatttggctggtgctgtaactgcaactttaataggcccttccactgttctatcaagcccactgcttcagactgatgagggacatggtaagaccagtggatctcaggataagcatgggtccgttgccacaagtgtttggctgtgaagagatttctttggtcatggcaacactgtgtggaataccataatggtagataaggcatgctgtaagttgatgaatggtagttttggcagaagcattttgtgcagggaaggcaaatccatatccagagtgtcttttttccagtaaggacaaaacactaccccatccatgatgggaagtggtccagtgtaattaatctgctaccaggtagctgctaatcaccccagggaataatacctcatgaggggctcagtgttggtctcggctgctggcagattggacattcagcagtgcctatagccaggatggcttggtgagtgaaagtccatgttgctgagcccaagcataacctccattcctaccactatggttactttgttcatgagcccactgggcaataacagaggtggttggggaaagaggctgactggtattcacaaaaccacttccatttgatgatggaatgctgctgtgcgttcccaactttatagcttgttgggtaagatgacactaagtttatgataggcagctcaggttacatgatgagttggtggcccatgatcaagtgttcagtttttactgaggccgaggagcaggccatgagctgtccctcaaagggagagtaattatctgtggataatggcagggccttgctccaaagttctaagggcgtcccttgagatcacctatgggggcctgccaaagcctccaaacagcatccctatctgctactgacacctcagctactattgtatctgctcgatcatataacccaagtgacagagcagcctgggcctgttgtacatccttctcttgttctgggctcactcaaaaccagcaactttctaagtcacttggtatgagccagagtaacacagccacataagtaatgtattgcctccaaaatccaagtaggctaccaggcattatgcctccttcttggctctaggtgtggccagatacagcaatttatccttcaccttagaaggacatgtcccatactactggatccctagaaacatcactgaaggagaaggcccttgaatttttgatttatttctcaccctctgccatgcaaatgtcttatcaataagcccaaagtaattactacttcatgctcactaggtccattcagcctaatatcatcagtgtaatggaccagtgtgatatttcatgaaaggaaaagatgatcaagatccctgtgaattaaattatggcatagggcttgagagttgacataccccttaagaaggacactgagggtgtatagctgcccttgacagctgaaagcaaactgcttctggtgggccttagagacagaggtagagaaaaagccattggccagatcaacagctgcataccaggtaccagaaaatgtgttaatttgctcaagcaacagaaccgcatctggtaaaacaggtacaattagagtcagcacttggttaagcttgtgataagccattgtcgttctctaagacctatctgtcttttgcacagaccaaataagagaggttactgggaatgtagtgtgaattaccacccctgaatctttcagtttccaacggtggcactaaatctatgtaatccctccagagatgcggtattgtttttggtttactgtttttctaggtagagaaagctgtaatggcttctgtttgacttttcccaccactccataggttagggaactaatgtgaggattccactaactgcttggcgtgtccattccaattacgcattttagaattggggaaatgaccacaggatggtttcagggaaccactggacccacttggagttgggcccaagctgaaactccattgatcacctgatctccataagcccctaatttacctggaggaccacagtgatgtttctgatatcttaaaatcaatgtcagttcagaaccagtgtccagtagtttcctaaagttctgattatttcctttgtctcaatgcacaattattctagtaaaaggccataggtcccttcggagaaggatgggagaatcattaaccatataaatgttcagtagtgtacaggggtctttgctagaggggacccagcctcctcttcatttaaagggttttgggtctgtaaactgccccaagactggaaatttagtgaagggccatgattctctgttttagtgatttgagttacacttttgttcatttgacctgaaagttttctgcttatacagattaagtaaaaatttagtaggtttactatctactttacttctagaaacactgtgaataactagctaacaccataggtttacacaagtcagactattctgattgttgctttgcctctgttacccataagagtaacttcacccatcttgcctttgatgattgagggccaccacttattcctgcagtcctgagatctaattatttccatagcatctatgtttttcagtcatgtgactgtggcttccactgtgaggtccaacctccagagaaggaccatcatggagcccttcaggaatgctggggctcccctcccaaatttattctcaaagtattgatgaaaagtatgtcttctggaccctcccagtgtgggtgagtaggttttaagtgacagatccactatagcattccaatcttcctaagccttttaatgtttttgaattccttcctctacattaaaccaagggagaccaggcatctccaacttgctcatgatgggacaccttttgatttatgttttagccaaacaaccaaactattagcactttccctaactccccaagctaccacatgaaatgcagaatctcttcttagtgagcctatattaataaattggacctaatccaattttgtgttcttttcactatgacctcacatccttaatacctattcccacacatgttctttggatttctgattgtataaattagaaaactcaagtagatctttttttaaaaattttattattattatactttaagttttagggtacatgtgcacaatgtgcaaagtagttcttttggagtgtagtgcacctcctcatgggccaccctttgtgcctcacctttaggagcctgctgggacttgagtctagttatatgtctagaagcaaagaggaatattgttggtgggttctgagaagaatcagaattgtctttgtaggcaactgtctcacaggagctcattaccatttctttaggcaatgcagggtttatcaggcagatgtattaatataaagtatggtaccgttgtgggaagagatacagctgcagccactgggggtgagggtgggaggtcactttttctggcaaacaagactcataagaatttaggggcttaatgtcaccagcctcatcagggcctttctacatgtgttcccatccaacttacagaatcccattttttcccccaatcaatactgccactttaacagtagacaccctgcaaggctgactttagctttcattgtaattcagacaatcatatgatcagtgcttgtgtttgattttcagcaatttcagccctgtggatgcaggaagaaagattctgaccaggcacacttaaagaagcccttaggctatttatgcttatttgaatccctgagctaattcttttttttcataattttgtccagtgacattagaagaaaccaactgaagtcattatgtttctttgttttccacaaatgttcgaaagtgtcatatacaaagtcaccaggttcctttcttcttgtatgtgtttaattcaaagtatcaaatataaatattctgggtatctataaaaatcctatgccatggattctcagtgctctctgtactattagaagtagagccctgagcatttttagatctaatcagattacagaacgagttccagaagctccaaaatcagttaataaaactcatccttaaagtcttctttctctagaaccactctggtagcaagatctgtatcagtcaggtttctccagagacagaaacaataggatggatggaaggatagatgatagatagatagatggattatttatagatagatagatagatagatagatagatagatagataatgtgtgaaaagagatttataagggaaatttgctcacacgattatggagagtgggaaggccatgacaagctgtctgtgagctggagaccctgggatactggtagcatggctcagtccaagttcaaaagccccagaatcagagaagctgatggtgtaattctcagtccaaggccaaaggactgacaactggtgtgctgctgttgcaattcttggagagcctgaagttctgatatttaagagtaggataataagactgtccccatttgaggagagagagaagagagagaaaattgccttttctctgccttgttgttctacctgtgtcctcggctgattggatggtgcctgtccacgttaatgttggatcttccctactcagtcaaactcatatgccattctcctccggaaacatccttacagacacacctagaaatgatgctttaccatttctctagatatttcttaattcagttaagttgacacctaaaatttaccattacacttctctacttcatagctctgtgatcttggataagagactcaacctgtctgagtatctgtttccttgtctttaaaatggggctaataatatctacaaatttgtcataagcattggaaacaatgtacataaaatacttggtacatagtagaccttcacagtaattattattcatttttattatgaaataaataggcataaaaagaatgtaaattaatctgtctattaatatgcaaatttgcttttattcatgtgcgactctttctttgctgctattttttattattgctggtaattaatgcctcaaatgctagcagcttttatgcctttaactatcagaagcttagcagctctaccttgtttatattcaggttaacttattgctgcctatgtgaaattgtgtgaagggatttcagaagtcatggataattttcatcaattgctgaattctatcctggaggttgaaatattttcacaaaggcaatgacctcctcttcctaccctgccccattaaagataaggcttagatactacatctctcttgaaaatctttctgctctttccttctccacatttgtcactttaacatctcccatgcatgccctctagacaaaattcatctttcctctctatgtagtttgaacacattgcttacatttaccataagttgtgaaaactaaaatattgttttttgtgatacatggcacctaggagtttgaggctgcagtgagctatgatcatggcattgaactccagcctgggtgacagagtgacacctagtctcaaaaaaaattacaatgtgaaaaagtatgaagttggtgaagatgatgaatttcaaattaggctgcaaggtccaacttgacaaaactctgggttcattgggcaaaatctatttcagaatgtttttctatggctgattttgatatctagggttggaagagaatggagaaatcatgaggacatttagaattatgaggttagtgcctgctaagaatgaaagggggaaatttatgcagagaagggagatggtcataagacaatacaaacaccaccagtgtccaactttgatgagtacttttcttattaagcacatatttaccgactttattttataacatcatcaaataatatgattttctatactctcacaaatcacttattggggaacattttatgcacttgaaaatgtgattttagatagaagaatcccaatgcgcttaagactcaaatgcaagacagcatgtaatcatgccaatgaattcattttgtaaatagatgcttatagcaaattataagtaattataaagtaattatgtaaattattaagtgacaatgaattagtatggcacatatttataaggagggagttattgttgagcattttgcaatgccaatgttaattaacaaaggctgtattagagtttggggggaaagctttactaacccaagcctgaggatatctgaagtgaatgagaaatgttaatctgcaagccatttgtgttagatatatactattttcctgatgtattaacattttctaaaagataaattagattagttcagcatagcttgttctttgtcagctcacgctggtgccttatgataattgtttttcttggcagaatctggcagggattatcagctatcatgttaaaccatcccccaacccctcaagtgaccttttcccaactatgaaaaccagaacaacaattactcatttttgggccattgacagttctcattatttcatcatttctcaaggttcattaatatttgtgtcatgatcagttttgcatgttattttaatttcctgagataaaattattgttggcttccacacatattcttttaaagcaacaagctgctttcatcccagttaaacttgccaaaactttccctactaacccaaagtccttaatctgacaccaaactcagtgcaccaagtttggtatcagattaagataattaaatcattatctttaagagtgattcctaaatctcaaggggttccttccaaaggagatgcatcagaatctactgcaccattgagccttgtgtgataaagccctccacaagatttaaggaatcagaagtaaaggcttgggaggatgggcatacaattaggccctgcataaggaaaatgcatataaccaggaaacctgttttaattaagcagaagtctacatgctaacaaagagaagaaattaaggaactctagccaaaaccagatttatcataattttcatacatccattttgttttctcccttctgtatctgtgattatgcaaagcttgcctgataaatgataattgggatataatcaagagataaataggggttaggagttaaccatgtaagaagttagagaaggctgttcaggcaggtaaaattgcatatatgaataatgtgaaacctagtgtggggatgtgattttgccttggagacattcaaaggttgtattagtctgcttaggctgctataacaaactgtaaaagacttgatggcttaaacaacaggaattaatttttttcacagttctgtgggctggaaggctgagatcagtaagtcagcgtgatcaggtcctggtaaggacactattcctggcttgcagatggctgtcttcttataatgtctcttcacataagggcactaaccccatcatgaggaccccaccctcccgactttaactaatcctaattacctcccaatggccccatctccaaatatcatcccattaagggttaaggcttcaatgtatgaattgtgggaggggacaaacattcactccataacaaaggtcaaggaacctggagagcaagagaagatgaatatgagatgaagatgaagagctgactaaggagatatttttagaagcatgataatggcaggtcatggggctggaaagcgaggatacttccagtaagtcaggagagtagtcaaggaagtgacgatgtctttgggacaccccaactgtggtgatcttacaatcaacaaaataagcctcagcattcacactgtagttaagctcattcaagcaaagctatctccagtagggaatttcccccatgaagagcatgaacattttgattttacctgttgtcaagctgatcctcattatttgctcatcttaatggtaaaaaacacagcctgggtggagatttaagctaatgagacatgtgatatatgaacaagcatgcacaactactgtacatgtccacccagaggaccacccagaacacgcatactagcaacacctcttaccatgcccttatgaataaccatgtaagactcccataaaggaagtctccctagtctcattctttgccgtctcaaccctactagcaccccgccctgaatcctctcactctcgggggtactgtctattctgcacctaactttcaaaatattgtttctcctttgcaatatgtagtgacatatttttatttagcagttttgaaacactctttttgtagaatccgcatgtggatatttggaccgctttgaggccttcgttggaaacgggaatatcttcacataaacagtagacagaagctttctcagaaacttcttcactctgtgatgcatctcctttgctctatgcgtctcgtttaaattattttaaactgtgaagacaagaaccgaggtctcacaacagctgtcaacactcagtggtgaagagctgtgtgttaaatgccacaggacttagatcatgtgcaaaagattttataagcattaaactcccaagcagagtactcttatttcagaaaaatcaccctgggggtagcataaagactgggtaagaaagaaagaatctgtaggtgggaggacacctagggcggggatgttcattataggacacttgtagtagtccagaagaaagatggcaggagcctgaaccatgacagtgagtgagatgagggagctaagggaagttctgggtattcaaaggaaatagttgcagttctaagcctaaaaaacagaggataggtcacagaaataaataataggggcatattgtttccctaaatctcttctgtgagttgtgcaatattttaattttaccacccaaatttctatgtccatgcataatggaattcactgaggcagtagtggccgtcaatcattgctccagtgcagaagttcagctcgtgctggggttattttcatgacgtttttgttcattttcagttgctataacagaataccagagactgggtaatttagaaagaaaagaggcttatttggctcacatttcagcaggctgggaagtccaagactgaggggctgcacctggtgagggccttcttgctgtgtcatgacatagtgggaggacatcacatggcaagaggcaaggagtgtatcagctgaagtctctctttcacttcttataaagccaccagttccactgtgggggcccaaccctgatgaccttatctaattctaattacctccgaaaggccctacctccaaatgccatcaacatatgcatttggaaattaagttttcaccaagtaaaatttgggggatacattcaaaccatagctcatggtcatgacaatttcgcggatagttgtgccatgtgtctggactgggaccattgaatggtggttttccatcactgaagaaataattaaagtgacccaaacaaagtgagtgagtgagcgtaaaagtgtccagggctaggaactataaacggtaggtcaccttattctcagttgggctgaattctcatgttgggctctactttagtagaaggcagttgggaagtgccttcttaccaacatcagaaagaagtcagataaaatcctgacttctttctgactaatctgggactcctatgagaaaaagaattggtaccttttagttaaaagaaagagatctcttcctgaagagaccagcaataggaatattacactgcttcatctcatatctaaccccaaaagagccaagaaaatgcacacaatatggagagaagcaaatggatcaaaactgagattagaacataatccctcagcagccagacagtccttaggaaagagaggcagtgctgtgggataggtccaaaacaggaagtccaaaaacagaaaaaaactacttttaaaatttagatttattccagaaagaatttaaaatatgtcaagcacatacactaatttagtatgtttatgattatccttatagtttataatactatttttataatttactatatttcccaatgctgatattctgctttctagcatatgctatcattttacatatacatatgcatacacacgcacacacacacaaacacacacaccccaggatgtgtgtgctaggataaaaggcagcaaaaccaaaagatgcacttgcttacaggcactgcaagcagcataatcaaggatgtccacgaaggagagaagcctagagctcagacctggagagctgtttcagtgctaagcacgaggagttggtaaataaggagcatgcctggaaatagagtgcaagatgagccaaagggaatgatttaagatggagtctatgaatgaagtgaaagtgtcaggagccctttcttactgataattgctttgtggagataggttcacctgcagcctaaagtcacggagcacgttcagaaaataatagcaatttgccatgtttgttgggaataaatagaaatctagggaagtgattctcaaagtttgttctctgaaccatcagcatcagcattatctgggaacctgttagaaatgcaaattatcggacctctctccatatctgctgaatcagacactctgggctgggatctagaaatctgttttaataatgtttcctgatctaaggcagtgtgtgtacatgttcctgtgtgtgcacaagtgcatgagggaggtattgaagaggacaaaggcagggacaggttgggaagagctaagtattgttttaagcaaagtctttctccttttggtataggtgacctcttcttctcctggtctgactctgtaaggggtgaaagaggatatagtagaatcccaagcaaaaaaacctgaaggtaattaagggggaagaaggaaagcccttcctaaaaaaataacaaaaagggaccctactttgttattttgcccccacattctttatgcaaaccttgattaattaaatttttaaaacttgctaggttgttattgatggaactctgctcaaaaacgccgaataagaaaaaaaacctggaaaaaaaggccacagaattctaaggggaagaacacctttcatgtcttctcagccaaggaaacctaatacctctgaactctagccccttagcccttctgaagctctttaaatagctcatgggggtttaggaagatttttcaaagtactatctgaatgatattaacttggaatattttcttttagcccccaaaggattcatttttaaaaatgctgcttgatcattaacacaaccagtgtcctcattaataatctgagctgcctacaaccatgtcctggttacctctgtgctctgctatttacaagctggtcacaaggagctcttgcaagtcattgaataataatcaatttgctttgttttccttctagattcattaaattgtcttccaggatgcccattaaacatgcatttctcatcaactaagtggttcaaaatgagagcctttgaacacttctaattagctctgtaaagtttagaacaaagttaacagagaccccaaaagactattgtttggagtttcagcccacggtttgctagttgccaagtaatgcaaaatcaagagtgcagtttttaccccctgaagatctctttgaaaaaccaagataaaaggaagtacattatttacagtagttgtcacatttgtggctaataattgttatttaggttaactcacatgcatacgaaacgtgttgcctcacttggagaggaatggctcggttttccaagccctgtaggccttttcagagacctgagccaagggaggtctaacatctaagaaagattgttatagtactccagagtttaaaactcttttttcttggatgaaagcactgtaaaattaactcttacctagctacaaagattggagggcattagcaagactacctgcgagatatttgagaggcatatggagaaaatggatgatctctcagaaatatcctcttagaatagccgttatcaaccttgcctatgtatctgaaacccatggaaagctttgaaccaatgttgatatctgggacccatctcagaccaattacttaaaaatctctgctggtggtatagccaagacagagtcatatttcaaaagctgctcagatgattttaatgagaagccgaagttgagagctattgtcttagaatccatcagttatcactttctggtccctgaagaagaactatgggacctatatgggttaaagggatgctcctccccacttcctacttataaaggaatagctgctcttctatttttgtcagagcagtagcatagattatccaaaagccacttgtgtttttttttattgttttaaaaaaatcttaaaagaatcatctagtttaactttgtattaataaatattaaaatttgtttgcactcaaactaatccaataagcatacattgactaagcatagagatggattttgggggatatgaaggctactgacattgaaatagtcccacaaaacacagagcagatacacagttaagagtgaactttaattaagctgtaaatattttgagctctatagatttttcttagtatcttcaggttctagagagttaatgtggaagaagcacacccatacaggtaaattagagagagaccacagcatggcacatgaagcttccaagtgactttcagttgtggcctcagataatatttattgtgaaaaacccattgaaatccttaaaccttggtaaacttagagtttggtaaattgtcttagaaagtcaaatcatccatattggttggttctttgtataacataactgtaaaaaattatttagtggctgggtgcagtggctcatgcctgtaatcccagcactttgggaggccgagatgggtgaatcatgaggtcaggagttcaaaactagcctggccaacatggtgaaactccgtctctactaaatatacaaaaagtagccaggcatggtggtgggtgcctgtaatcccagctactcgggaggctgaggcaggagaatcactggaacctgggaggcggaggttgcagtgagccgagattgcaccactgtactccagcccgggtgacagaatgagactccttctcaaaaacaaacagaaaaattatttagtttaggagttgcaaactgtcagctatattttgtttggccaactttgtgttttaaaagcataggtcagtggaattctttgtgattccactgtgatataaacagaaggcaaggaaatactgggaagaagacggtagggtccctggtgagggctccaccctcaagcctgggcccatcaccctaaatgagaacttcacattcctgttttccggcctgaatgttgctttttggctcacactgcccccctatcctgtacctataaaacccctaaactccactggcagagtagcagagcggcatggcagagaaggagagaagagaagaagcatctgaatgccaaagaggcagctggatggttggaaaggagtttggctggtgatggccaaactccagggggaagattatctttccactccatcccatttccagctccccatcccactgaaagccacctccatcactcaataaaacctctgcattcaccaaccttcaagtccatgcgacgtgattcttccttgatgctagataaggacccgggtaccaagagggcaggatgtggtgtaaaaggctgttatcctgactcttcactgagttggttaacacttagccatctgtggatggcagttgctaaaagagcattaattgttacacacccctagatgctaccatggggctggagcccaaaagcacttccccagccccagcacccactcacctgccaagttccccctcccacaaggggtttgagtgtggtggccgagtaagcaagccataccccctctcacaggttccatgaaagggtccaaagaactctcccatctcaagggtactgtgaaacaaaagccacaggagttgatctggtattattctgacttttgtttaaagtggtcttatgggaactaggtcatcctaacatatttttctcttagcagggcaaaccaagcaatatcttgtactatgtttctcctccagatctagcagatgactctcttaagatcaggacaaatgtatcactaataaatatttcagggcatgttttattgtcttatacatttaaaccttacttgttccctcgtgtaggttctaagtcctatatagagaaggaccacctatacttattttgtacttccctcattacatgaagtgtaatatttagacacatcatgattattaaacacatgcagggtgataagtagtgttattcaaatacatatagagttttgtgtgtgtgtgaaacacatatggtagatataaatgacatatacaagtgtgtgtatatatatgcatgtgtgtgtgtatatatatgcatgtgtgtgtgtgtacatatatatatatatatatatatatatatatatatatatatatatatatatttggaatgcctatttgtagagagagggggatttgagaggaagaactgaagagcattcttagcattttatgaatatgatcattgccctgccaacagagcatttcaccaagtacagaaacagaaccatttaaacaaataacatagatagaagagtatggatgttctaactgaatcagatgccctaactttgcaaattctgccagatgggaggtgagtgccctgaactaacatctggtaatgaatattaaacaaagaataaaaataaaagttagtaaaggcattttttttcttcttgcttcaggccttggtttaaactaatttcatcggatcctcttttccttcttatgatgtagaattttattttccagggaattgaagactctctagaagagcatattaaacaattattcttatcaccgaagactgctttttgacaggtacactcagagacaaaagagaaacacctttccctggaggaaatgggaaataaggagaaagaatacaaaatgtaattctaatgtggtacagtccagccacactagaaaaaggtgatgaataattcaggagaaaataaagtacaaatttggaaccttttgtgagcatactagcaatctcagaaaaagagataagtagacttggagcagaattcagctagatcattggatgttggcttagaattcacctttgttttgtctgagtagttggtcaggctccagttgaagctgagcgtggctgaacagtcagagagggaaaatgaggccatgaaatcagatatagtgacgtaaagcagtgtaaagcacatctcttcctttgcacaataatagcaaatctgatttttctctctgtcttaatcatagtgctatttaccttgacacttctggcattcttggtaggaccacatcctagactcccagaattttcttaaccttggagataaatttaaggtagagaagatgataaccatataaccccagcatcagagttcagctctgcttgtttcaatagtgctttggcattccagtttctagtccctccttgccatactaggcctgtgaaactggccttgttttagctacacactgtaatagaaaaccatgcctatgagacagattctactagtattcatgaaactccttctagttagctttattctaactcttattctttcatactctctccactattccctctctagccttgacaaatcatgacaatatttctttcttctcaaactcagtgccctgtgagagtctcagactacttccactcttctgaattcttttttgtcagtgatggttttggacttccctgttgtttctttatcttcatttagacagactggaattactatgaggttggccagtgactcagtgattcaaaaagttgaagctgtatgtgatttgttggatgccttcttgaattcctgcctctattggccaattagaaaggacagttctcatgcattgtctaggatgccttcagaaatcgctgtcactcaaattcatattgtagctaccataaaatatgcaacttggatagaattattctccaagagcatttcttcatgaaatcatgtatcaaaatggcatgctatttgtgcaaatttaaggcgacttatgaatattttgaaactcttgtgacccccttctgtatggaatatgttctaagtttgagagggggggtatatagactgtcattttatgttaaatggcagtgtgaaagagagaaaaaaacagttaagtgtgagccaacaataaacttgaagcctccgcctgactcaatggaccccctcttggccaaaaggacctcagagaaatcggaaaaacctgaattcccagactggacacgcctccttatactctcagccttttggagtttaggcacagctgacaagcattaaagttaaaacagatatcataagattgacacagcagactctttgtggcaataagatatcaaattataaaccagacctaaggccatgcaaggcaagggttaaatcacaccctacaaaccataacatctcatgacgtggattcttaaaaatgatccaggtacagcatggctcactttccaaactgattctagtgtagtatcacatgacagatagcagaccctcaagcaaataaaaacattttactccaaaatatatttggcatattttgaaatggccctgcaaagctgtcttttgtggagaaaatttgcgtctgcagagaatctccattaatgcagctagaccttccctttctaggccttttctggctctagaagagaaaattagtctgataccattaggtctcaaaagagacatttactgcctgttctcttggagctctgttacctaagaggcttaatctacataacaagggccttggtccccacaacccctttattttaactcaagcattcatttctactgactttaggtccttagacaatagcttaactctctcaaccaattgttaaataaagaatccctaaaacccacatgtgacttacaagttctcacttcaagatgtcctacctttcaggccgaaccaacatgtaccttgtacgtattgatttatgtccttgcctgtaactcccatctccctaaaatgtataaaaccaaactgtaacccaactgccttgggcacactttctcaggatctcttgacattgtgttttctgggtcatgccactcatattggctcagaataaacctctttaaaatatttcacagtttggattttctgttaacaaaagaggaaaaatggaaaattaaactataaagaaccagtaaaaataaatgtaattggctttatatcttagaggaatatatgtataaaaatgtattttgttgttatgttttgttgttccatatgttctcttgctattgtgattttacagactctctactttctcattggttgttctctggcagctcatttataatgtggattttgatgtttggtgaatataacaatgtgtcaatgaaaagagccaaactataaaatatttacagagatttattccgagccaaatattagtgaccatggcccgtgacacagccttcaggaagtcctgagaacatgtggcagccaaggtggtacagcttggttttatacattttagggagacatgagacttcaatcaaacacacttaaaaaatgcattggttcagttcagaaagataggacaactagaagtggggggctggggtggctgccctgcggcaggggcttccagggtatagatggattgaaatattttttggttgagaattgattgagtttatctaaagacctgggatcaaaaaaaagaaaatgtctgggttaagaaaaaggactgttcttatttgtagaggaagccttagccttgagagagaataggttgaaaaatgtttcttatcaggcttaaagtctgtgttggtgttaatgctggacaggtataatgaggcatctctgacccacacttcccatcatggcctgaaccagtctttcaggttaaactttaagagtgcccctggcccaatcaggcaagagaaagaaatatagcgtattcagttaggaaaagaggaagtcaaattgtccctgtttgcagatgacatgattgtatatctagaaaaccccattgtctcagcccaaaatctccttaagctgataagcaacttcagcaaagtctcaggatacaaaatcaatgtgcaaaaatcgcaagcattcctgtacaccaagaacagacaaacagagagccaaatcatgactgaactcccattcacaattgctacaaagagaataaaatacctaggaatctaacttacaaggggtgtgaaggacctcttcagggagaactacaaaccactgctcaacaaaataaaggaggacacaaacaaatggaagaacataccatgctcatgaatagaaagaatcaacatcatgaaaatggccatactgcccaaggtaatttatagattcaatgccatccctatcaagctacgaaatactttcttcacagaattggaaaaaactactctaaagttcatatggaaccaaaaaagagcccgcattgccaagacaatcctaagcaaaaagaacaaagctggaggcatcaggctacctgacttcaaactatactacaagtctacagtaaccaaaacagcatggtactggtaccaaaacagagatatagaccaatggaacagaatagaggcttcagaaataaaaccacacatctacagccatctgatctttgacaaacctgacaaaaccaagcaatggggaaaggattccctatttaataaatggtgctgggaaaactggctagccatatgtagaaagatgaaactggatcccttccttacaccttatataaaaattaattcaaggtggattaaagacttaaatgttagacctaaaccataaaaacccgagaagaaaacctaggcaataccattcaggacataggcatcggcaaggacttcgtgactaaaacaccaaaagcaatggcaaccgaagccaaaatagacaaatgggagataatgaaactaaagagcttctgcacagcaaaagaaactaccatcagagtgaacaggcaacctacagaatgggagaaagtttttgtaacctacccatctgacaaagggctaatatccagaatctacaaataacttaaacaaatatacaaggaaaaaacaaccccatcaaaaagtgggcaaaggatatgaacagatacttctcaaaagaagacacttatgcagccaacagatacatgaaaaaatgctcatcatcactggtcatcagagaaataaatgcaaatcaaaaccacaatgagataccatctcacatcagttagagtggccatcattaaaaagtcaggaaacaacaggtgctggagaggatgtggagaaataggaacacttttacactgttggtgggagtgtaaactagttcaaccattgtggaagacagtgtagtgattcctcaaggatctagaactagaaataccatttgacccagcaatcccattactaggtatatacccagaggattataaatcatactactataaagacatatgcacaggtatgtttattgcagcactattcacaatagcaaagacttggaaccaacccaaatgtccatcaatgatagactggattaaaacaatgtggcacatatacaccatggaatactatgcagccataaaaaggatgagttcatgtcctttccagggacatggatgaagttggaaaccatcattctgagcaaaccattgcaaggacagaaaaccagacacttcatgttctcactcataggtgggaattgaacaatgagaacacttggacacaggttggggaacatcacacagcaggacctgtcatggggtgggaggatgggggagggatagcattaggagatatacctaatgtaaatgacgagttaatgggtgcagcaaatcaacttggcacatgtatacatatgtaacaaacatgcacattgtgcacatgtaccctagaacctaaagtataataatatatatgtataaaaatatatatatgtataaaaatatatatatatacatatatatgtgtgtgtatatatatgtatatatatacttatatatgtatatacacacatatatatgtatgtgtgtgtgtatatatatgtgtgtatatatatatgtgtatatatatatatgtgtgtatatacacatatatatatatatacatataaaagagtgcccctggccaaggagtaagtccattcagatggttggctagccttagaattttcttttttgtttatagatgttatacataacaatgatatccttgtcctatccacaagagcctattgaattcacaaagtagctaaaatattgcatgtttgcaacatagtgagatcttaatgtttattaagaagagttattttaattaaaaccaaattgagaggaaatagatgtagacttttaaacaattctgtaaggacttatgactttgttttttttattattattcaggcatttctccacttctactttctttttttttttttgtttgagacagagtctcgctctgttgcccaggctggagtgcagtggcctgatctcggctcactgcaaactccacctcccgggttcacgccgttctcctgcctcagcctcccgagtagctgggactacaggcgcccaccaccacgcccggctaattttttgtatttttagtagagacggggtttcaccgttttagccaggatggtctcaatctcctgacctcgtgatccgcccgccttggcctcccaaagtgctgggatgacaggcgtgagccaccgcgcccggcctctactttcatttttataggaaacgattaagaccgttttttgtttctgttttggttgatagatatgatggaagatgtggggatgagagaaggagactgaatcggaagagagatttttcgtggtatctttagtgttgttggaaaaaacaggattaaaaagaagaataggtatgtgagaaaaggaattctttttcttttctctttctttctttctttcttctttctttctttctttatttcttctttctttcttctttctttcttctttctttctttcttctttctttctttctttctttctttctttctttctctctctctctctctccttccttccttcctttctttcttctttctttctttctttctttctttctttctttctttctttctttctttcttctttctttctttcttccttcctttctttcttctttctttctttctttctttctttctctctctctctctctctctctctctctctctccttccttccttccttccttccttccttccttccttccttccttcctttctttctttctttctttctttctttctctttctttctttctttctttctttctttctttctttctttctttctttctttctttctttctttctttctttctctctttctttctttctttcttttctgaaacgaagcctccctctgtttcccaggctggagtgcagcggcaccatctcagctcactgcaacctctgcgtcccaggttcgagccattctcctgcctcagcctcccgagtagctgggaccacagtcgtgcacgcgccaccacgcccggctcattttttatatttgtggtagagacgacttcccaaactgctgggatttcaggtgtgagcgactgtgctcggccataaaaaggagttcttaagatgtctttatcgagatggataagaggaaaacaaaaagccaatttggccatacaggcaggtcttacttgacacaattctgatatgcgtggatttcagttacaagcacatggtattaagtaaccctagtcccaaaatatggttcaaattttgattaccacagaatattaactgtgaataattgcattatataccaacgttgccgaaagctcttcgtgcacaaaccactaagtaaataataggctgctatcatggtcaatggccaatcgggtcacttctttcaaggtctatggtgagtggttactgcacgtctattattccattcatgcacagacaacaaagcatatagttgtgttatgtccttgtctgcccctgattaatccacatgccattttacaaaattagacaatcaaaacagaagtgacccacaaagttcaaaatggagtaaagaaagagaatgtgctaattctggaaaagaaattaaaattaaacataaatgaagttatagaacaaagagctgaccttgacattgccatctttcgagaatctctgcacatgcagccagatacactgagtgaagaaaaacttatttattttattttattagggaaacttattgacataaagtggttgtgataaagaggatgaggatcactttggaaggccgaggcgggcggatcacgaggtcaggagatcgagaccatcctggctaacaaggtgaaaccccgtctctactaaaaaatacaaaaaattagccgggcgcggtggcgggggcctgtggtcccaactactcgggagactgaggcaggagaatggcgtgaacccgggaggcggagcttgcagtgagccgagatcgagccactgcactccagcctgggcgacagagcgagactccatctcaaaaaaaaaaaaaaaaggatgaagatgtcctagaggaagtgatgccagcaaaaactttcaaattgaaggaacttggagatatttcataatactgaaagtgcaaaggttaaaaatgttggaagctaatacaaactttggaaggaatgtgaccatttgccaagatgtgaaaagaagcttgttctatattgtaagttacacaatgagaagaaaagggaagcactgttcaaagagcttatcaagagacaagttttttttacaaagaaatatgacgttttaattctcactgcctctaatgttttaaattacagtgtactaaaaaatagttttactgttttttccatcaccctatacatatataactgatagtaatagggtttttaatattttgacaaaagatttaaaggtcacagaacaatttaattttccctagtgattattaaagattactttgcacagtatcagcttgcacagtcatttttatgaatactgcctgctgtgcaaagtgaagactgtctgcattcccatgaaaagagaaagagacattgatcagatcttgccctatacacaaatgagatgttaagattggtccacagcagattgattggcagtcttgagtaacgtgggaacccatgcatacaggacatatgcaaattagagtcctggaatttgattttactctgaaacaacagaaataacattctctcttagaccaaattcttaatagcttggaatcattgacacttagattggaaaaggatattatctggtttagtttacaggtaatgacgttgaggcctgtacaggtaaatgaagtggctcatctgagagcacatgcctggttagtgacagagggattaaaaagaattgagatctcttgactcctggtctaccccttcttcgtggaaagaaaccaaagcacattctttatgagaccaccatggaagatgttgcaaggccttcgaagtaggggatgatacctgttcatcgcatggctcctgtagacgtaactaacagcagtattgaaaaaatgcaagctcccagtgaatctctgtttccttttaatgctgcagtttgttttctggcagcctgttagcttgcctcagaagaacatttgaagtagggctagatttcccttgacattgttaaatccagatcctttccaaagtaatttcttgaaagctatttaagttgtcccactagatgaatacctgctgatgactgttctattcaccaactaattcctgagcttttcattgctcgattgcctatttagtttgtgtaatttaacactttgttgtcatatttgtcttaactttttcatttttattttcttcttaccagaggcaagcagagagacaagggagaatgatttatgaacctttctagcttgaaattcttggccctttttgtttctctttggaatttgaataatttgagatgtatagaggcatgaataaggggtggttatacagatttaattttgacttttttgaaattcagtaccaaataacatgttgatattctcatgaattcaataatacacttcagcaaacacatttcgtgttaccctattttgttatttattgtgtgatgactttctgaaattgttattataatagctatttacttgcaacttttgttttttatttactaatagctaagctacagttaaaaggacctgagatgaagctgggaaataaaaataacagtacaaattagcatattgtaaatatcaaatagtcttatatatacacatctttgcccactgtattcccttggtttgactgctcttatttctctgtctgatttaccctatttttctacaagatgcaatggggccctttcctcctttgagaagccttctctcacctcctagactggctaaatgacccatctctctgcttttagagagccttgttcctctcttcttaccacagaaccccttgtgctttacgccagtaggtgttctcctgcacacccagtttggccttggagatgtcttcctgggaagagttacttcagtgcctcaggtatttgggttcttatcattgctaaagggtacattaccagcattttaggagggagtttttttcctcttcaaattccctgaaataatgatgtgtcttagacctgttttcttccatctactaggtgtcaatccttctaggtcacggatacatttttgatagatgtcataatgtcattgtaccaccaacccccttctacctgccacactttagcatctgtactttggaccatttatttgaaaacaattccttgaagagtctccagtgggacatttttccttgtgtgtatgtgtgtgcatgtgcatacaagtgtggttggcttggtgccatctcatatatatggcatttacattctgcaacattgccctttaatgaaaaccccagttcacgggaaaacagtttttccttgtcagtctgctcatagttctctaaccaggccttttacattatttcttctgcacttcttctcttcctggcctccttctttagataatctacatccttgttctgttcttaaaacaataatattcatccttcaaggcccaaatcaagcctcatgccctccagaatgctttcctcctaataacatgcattctggacagcatcttcctcaaaattcctgcagcctacttcagggtgcctactatgagagagccagtgtaagaattggaagcagcgagattagatccactatctattggatagatatgtaagtaaccagatgttatagacagaataattctctccctcaccccaccaaagatgcccatgtcctaacccctagaatttaagaatatgtcattatgtggcaagagagaattgttgaggatggatgtggagtcaggattgctaattagctgacctaaaaataagcagattatgttggattatctgggtggacccagtgtaatcacaagtgtccttgaaagtggaggaaaaccgcagaagaggaagtcagactcagaatgggttttgaagatgccacactggtggatttgaagaaggtttgaaagcagcatttagaaactgaaaatgccaaggaaacggagtttccccctagagccaccaaagaatgcagccgtactgacaccttaattttagttgtgtgaaagttattttggactttattctatagaactgtaagataataaatttgtgttgtggtaagccactaaatttgtggtagttcgttagaatagcaataggaaactaacatatccagcttaatgcccgacaccatttaactcaattattttctaaaataagaagagataatatatattgtgtaacttatcataagacattttaatttatgttatatgtaaatgttactaaacattctcagccaatgagaactagggagacagagtaaactgcacaattctagaccaatgaacattagcaaactacactgtctctgctctcagccaatgagagttctactttgctattttcagtgagtgtacttcgcagcgtggttcactccaccaagaaatttacgtttgccatttagtttatgcaatatagaacaattttgactcgtaatggctggcaaaagtttatagcacttctccttgcttctatactcattcatttcttagtaatcacagtgatctttctatgccgtaaatgagattatgtcatacctcatcttaatagcattcaatggctcccatctgccttcagaataaagtctaaattctttagcagtgcctcctgtaaatagctacctccttagcctcgtctcttattattccccagtgtcaactgtctacttgcaagttccactgactgtttaataccatcattctcccagcaaatacccacttggaatctgctttgtaactttgcctgggatgctatatttgaataaaattcactcatcaactaaataccccctactcaattcctttgcctgtgatctccaatgctatagaaaacctatgtctttcttcttggcctggtagaaaccaccttggccagggcatggcatagccagtatataactgattcaatgaaaataacatattcagagcattacctctaggggcaaccatgaaagggagaactggcatcagtgaagcagatggtttttgcatttgcacctgggtcagtcttagcttctgcattgatactccaggttatattctcaagatctggatttctgaacaccttccctttcctcagtcttctttcataagcctggcagcttcgattaatacttttggaaactcaaaacagagtatctgattttgctttaatttctgaaaaatgagaataatttccctcattcctaagagtacctggtcattttaaatttctctatgctctcctctggcatagaattttatctggagtctagatttaaatatgattgcctacctaggtgtgatttccttgagacttccaagtggtattctagcactgcccttccctgaagagaaggaactaggcaatattctacttaacttggctgatctgagctacataagccacccacagaaaggggtatagagaggttgctgcagtttgagctcagcaggacacattggcttggtctgctacattttttctgatggcttgtattggcttccattcttcaagatggcatctccttggaatttttataatctttctttgcctactcactagtctaatgtctctagacttagcagcccttcagtaggtatgagtccccctgtatcatctggaaattgtcatatgtgaaagcaagtgttatgtttaggaagattttcttccccattaggcaggtgctgatgaactgacaggctggggtttctccattaagtgtgtgtttctttaagagtaactagggtcctttccatttcccagcttctctaggtataagtgggggagtgcaatcttctctcagccaaatgcaaagggaatcacttgagcgcctctggtcagacttccttgagggtgggtggctggcgtgggcaggatgagagctatctacatgtaggagtaaaaatagttcctccttgtgtcctgaggtatctgttgtagttgtgtaactttctgcctgtatgtgtttcccttcttgtattgataagcttatgaattaattcttcggtacaattttgatacaagtagtacaagcatgctgaactcaccacccaacctaaacactctctatactgttgaagagcatgactttgacgctgaacaccattctgcctcatggacagatactgattggatgtttatttcactggatagattccaccaatcacaatctgttgctgaaccctagcacaagggtctagagtttcttacgtactacctgctttgtggtttacttgctctaactggggcagaatgaaacctgcagttgttagaagccagcttggaatggcaggagataccaacattgctaaaaacagccatcacttaaatggtcagccagattaatgcagtatatatagccacagcttataaagactgtctttggttatgaattatttaaatcatttcctagaatattgaggtagatttttgactcaagccattgcaatacaacttttatgagccttcttccacatgcaaaaaaatggttgatgttctcaaaagcctataggctggtaaggcaaagactactttcttactgaatgtagctaagtttcttatctatggcctaccatatggagagcattagacaacttttgcataaatctccttttttcttaatggaagttgaatattggccttgggggatccctgacaaatcaggcatcatctgtttataccattcttctgaatggaactcttggacttgagctgtttggttccacaatgagttgcaggtgctgagagggattgatgacgctctacttaattgcttgtcacacagataatctgatgagggggcatcagtgccagcagctggcagctttctcacccatgacctgaggcagattcttgggttaagaaggttgtgagataaaacagtaagaattcctcccttataaatgtttctaaggacattagttggggcgggcggtgtttctggcttaattttgagaatacaatgagaacaaaatatgtatttcaaagatcataggttttggtataggagagtcctaggtgagcatcctagtttattttcattcattgtgtgccctcaggcaagctattaaacttttctgagtcttggtttcctcattaataaaatgagaataaaaatatctaatgttacaggattgttagaactcgtgtgaacctaagggtaacactaagtgtggtgggggccagtgcttctcaaaaggtgaggctggaccagcaacatcagcattgccagggagtttgctagaaaacacacatttttgactctctcccactcctcctcagacctgctgaaagagaaaccctgaggcccagcagtctggtttaacaagctctccaggtaattgaactaaagttggaaaatcctgatgtaggctttcaaaaagtgattgttaaggtgaacagaagggagccaatattcaaaatgctaagtgatcacaagaagtcagaagccaaggtctagccccagaaagggtgagaagagctgatgagcaggaaagactggggaaaacccatcctgtaaggagcacagtgggattctgaggacacagttgagtgttccagacaggacagcctctggagctccaacagggttgcaggccagcctgtgaacccttgttccctttcttgctcctcagtgaagcctaagtttaccttccttcatgtctgactgcttgcaaatctatcgaatcttgtggaaactgtttttttcccccaaataaataatatttagacttaaagtatttagaatctaaacataaacttttacaatgaattaagtgtataagatcctattgaaaataatggaaaatattttctattcacataggttatccgtgaaaaagagtaattgctatgttataattacgagcagtataaatagacctgcttttatgcttttaatgagggttttgaatatatttgaccaaggtattaggaattataatacagcaaccttttcaatatcagtaacaatatctaaatcttatattgctttttacagattccaatgttttcatgtttattcactcaatctgatttctacacacagcagatcaaaaaaagttgtgagttcagctttctccactgtttggaggatacagctttagagaggtgtgaagctgagaccattggcatttggacatcagtggacactgtgaggtgctgcatcattttaagactggagtccacagcacttgtgaggaggaggatgacaaacatcatctgtctaggctcagtctggaagaatttcttcaacactcagctggggcgccatccacaatctcctggaaacgctccaaccctgtaattatattctgcctctcaaaatcagacttcgttttctaattcaataatgctccattttatcatgctcattttagatactttcgtctctcatttcaagagtttaaataacagacaactatcacgactttgggaggaggtaggtgagacagagcagtgctccagaattaggtcccacccccgaggcctctctcagcaatcaggctaagacaccccacaggctgtctctttctgcctcccctttcccacaacacaatcaccagcttctccaatgcatcacctggcctgaatgcatcgcctggagcattgcctggagcattgcctggcccgaagggcagcaccaccccatgggaccatcctggatgattaggaaagaagaaactatttctgccagactttctttgtagtttcgtttcagaaacctcatttagttcttcagctgttttaagcaatgtttctgaaagaaaaaactatcatttaggagaatcgtttgttgatgctcatatgttgcctttgagtgttaccccttcacagttgctatggggagatacaagcaaaacaaaacaaaacaaaacaatacaaaacaaaacccagtagatttagttcctcttattactcattccattaataacccttgagtacttattatatacaaggcaatgtagaatatgaatccatgaatcacatctagaatttgtctataagaaacatgggctataaaaataggctgtgtttactaggctgataacaaatcctttctaaaacttatcctacatgaggtaaaatcaatgcagaggtcaagaatctcaagcggtatacagtctaggtgaggccataaagatgaatctcaggacagacctgcttcaactgaactagacatgttactattagaatagttccactggagaactggttgtttaaagacagttcagacacaaatcttttgctatacaaagaaaagaagaccccagatttagagttacgtctattgttaagtgcagaacagctgcatgctatgtaagggttgttcactttcaatccccagggcaccatttacatagactgggacatggcctgcaacgtgcagtctatgcaattgcatgcaatagctctatatgaatgtttctggaaaaaaatagactttatctgaaaggatgacttacacctcctaatttaactattcacattttgggatttgcttggagccaaaccagatttctggctttttgctgccaaaccagattttaggaaaatcctgcaaatatgggtttgaccaaagttttgtactcttaacctcctgctaaaatggtctagtccccacttttagtaacaatctcacccccgccatcactctaaatatcctaactgggaaagctacctatgaacttttctctctggtcaatgattatgatcttttcccttttttctttgcaaaacctttctgttttctgttctctgcttgaaaactgaaaatatagtttatattctgggttgaagatgttaatgtgctttataattacttcagataatatacatgccttggacaaatgactgtttaactccctgtcctcaggttgtggtttttggcaagagcaatttttttttcataacctttgtcttctgaccctccattaatccacagtttacaccttcccttccttacccttaggtcttttctttcttttttttttttttaattatactttaagttctagggtacatgtgcataatgtgcaggtttgttacatatgtatacatgtgccatgttgttgtgctgcacccattaactcgtcatttacattaggtatatctcctattgctatccctcccccctccccccaccccacaacaggccccggtgtgtgatgttccccttcctgtgtccatgtgttctcatcgttcaattcccacctatgagtgagaacatgcggtgtttggttttttgtccttgtgatagtttgctgagaatgatggtttccagcttcatccatgtccctacaaaggacatgaactcatcctttttcatggctgcatagtattccatggtgtacaggtgccacattttcttaatccagtccatcattgatggacatttggattggttccgtctttgctattgtgaatagtgacacaatgaacagcgtgcatgtgtctttatagcagcatgatttataatacccttacatcttttctcactctaacttccccaggacttcctctcagtacacatctgtaagtttaagtcattcctacttcatagcccttcataatccttcatccacaggttggatgaaagtatagattggtaaaaggagacaggagactccgtgatggcctttggaactccaggtcctgtggagtagagggagaggagtagagatgaagctgaggtcttcaaatgcagatggggtggaggtaatacttcaagtgctgtgatgcattctcatgaaagtaagatgtagaaactctcttgatgacttcaactttgaaatgcaacttttctatcagatgtgtatatatactctttatgcacgtaaatactcatttcccaaaggagacgttaatctttgtctaagccctaaagatggagatacttttcttatttatttacttatttattttttaatttacttcaagttctggatacatgtgcagaacgtgcaggtttgttatataggtatacatgtgccatggtggtttgcagcacctattaatccatcatctaggttttaagccccacatgcattaggtatttgtcctaatactctccctccccataccccacgacccccgacagaccccagtgtgtgatgttccccaccctgtgtccatgtgttctcattgttcagctcccacttatgagtattttattctctttgtagtaattgtgaatgggagttaactcatgatttggctctctgtttttctatcattggtgtataggaatgcttgtgatttttgcacattgattttgtatcctgagactttgctgaagttgcttttcagcttaaggagattttgggctgcagtttttggttttgtgtccttgtgatagtttgcttagactgatggtttccagcttcatccatgtccctgcaaaggacatgaactcatcctttttttatggctgcatagtattccatggtgtatatgtgccacattttctcgatccagtctatcattgatggatatatgggctggttccaactctttgctattgtgaatagtgctgcaataaacatacgtgtgcatgtgtctttattgtagaataatttatagtcctttgggtatatgctcagtaatgggattgctggggcaaatggtatttctagttctagatccttgaggaattgccataccatcttaataaatttgttatttgtagattctggatattagccctttgtcagatgggtagattgcaaaaaatttctcccattctgtaggttgcctgtgcactctgatgatagttccttttactctacagaagatctttagtttaattaaatcccatttgtatattttggcttttcttgccattgcttttggtgttttagtcatgaggtctttgcccatgcctatgtcctgaatggtattgcctaggtttttttctagggtttttatggtgttaggtcttacatttaagtcttgaatccatcttgagttaatttttgtatatgaggtaaggaagggatccagtttcagctttctgcatatggctagccagttttcccagcaccatttattaaatagggaatcctctccccattgcttgtttttgtcaggtttgtcaaagatcagatggttgtaggtgtgtggtgttatttctgaggcctctgttctgtttcattggtctatacctctgttttggtaccagtaccatgctgttttggttactatagccttgtagtatagtttgaagtcagttagcatgatgcctccagctttgttctttttgcttaggattgtcttggttattcgggctctttcttggttccatatgaactttaaagtagttttttccaattctgtgaagaaagtctttcgtagcttaatggggatagcattgaatctctaaattaccttgggcagtatggccattttcacaatattaattcttcctattcatgagcatggaatgttcttccatttgtttgtgtcctcttttatttcattgagcagtggtttatagttctccttgaagagatccttcacatcccttataagctggattcctaggtattttattctctttgtagtaattgtgaaagggagttcactcatgatttggctctctgtttgtctattattggtgtataggaatgcttgtgatttttgcacattgattttgtatcctgagactttgctgaagttgcttatcagcttaaggagattttgggctgagatgatggcgttttccaaataaacaatcatgtcatctgcaaatagggacaatttgacttcctcttttcctaattgaataccctttatttccttctcctgcctgattgccctggccagaacttccaacactatgttgaataggagtggtgagagagggcatccctgtcttgtgccggttttcaaagagaatgcttccagtttttgcctgttcagtatgatattggctgagggtttgtcataaatagctcttattatttggagatatgttccgtcaatacctagtttattgagagtttttagcatgaagcgctgttgaattttgttgaaggccttttcagcgtctattgagataatcaattggttctgtttatatgctggattacgtttattgatttgtgtatgttgaaccaggcttgcatcccagggatgaagcccacttgatcatggtggataagttttttgatgtgctgctggatttggtttgccagtattttactgtggatttttgcatcgatgttcatcggggatattggcctaaaattctctttttttgttgtgtttctaccaagctttgttatcaggatgatgctagcctcataaaatgagttagggaggaatccctcttcttctattgattgaaatagtttcagaagaaatggtaccagctcctgtttgtacctctggtggaattcagctgtgaatccatctggtcctggactttttttagttggtagactattaattgttgcctgaatttcagaacctgttattggtctattcagagattcaacttcttcctggtttagtcttgggagggtgtatgtgtccaggaatttatccatttcttctagattttctagtttatttgtgtagaggtctttatagtattctctgatggtagtttgtatttctgtgggatcggtggtgatatcccctttatcattttttattgtgtttatttgaatcttctctcttttcttctttgttagtcttgctagcggtctgtctattttgttgatcttttcaaaaaaccagctcctggattcattgattttttgaagggatttttgtgtctctatctccttcagttctgctcttagttatttcttgccttctgctagctttcgaatttgtttgctcttccttttctagttcttttaattgtgatgttagggtgtcaattttagatctttcctgctttctcttgtgggcattcagtcctataaatttccctctacacactgctttgaatgtgtcccagagattctggcacattgtgtctctgttctcattggtttcaaagaacatctttatttctgccttcttttccttatttacccagtagtcactcaggagtaggttgttcagtttccatgtagttgtgtggttttgagtgagtttcttaatcctgagttctaatttgattgcactgtggtctgagagatagtttgttgtgatttctgttcttttacatttgctgaggagtgttttactaccaatcatgtggtcaattttagaataagtgcgatgtggtgtgagaagagtgtatattctattgatttggggtgtagatttctgtagatgtctattaggtccacttggtgcagagctgagttcgagtcctggatatccttgttagccttctgtctcgttgatctgtctaatgttgacagtggggtattaaagtctcccattattattatatgggagtctaagtctctttgtaggtctctaaggacttgctttatgaatctgggtgctcctgtattgggtgcatatatatttaggatagttagctcttgttgaatcgatccctttaccattatatagtggtcttctttgtctcttttgatctttgttgttttgaagtctattttatcagtgagtaggattccaacccctgctttttttctttttgctttccattttcttggtagatcttccaccatccctttattttgaaactatgtgcatctgtggacatgagatgggcctcctgaatacagcatactgatgggtcttgagtctctatccaatttgccattctgtgtcttttaactggggcatttagcccatttacatttaaggttaatattgttatatttgatcctgtcattatgatattagctggttattttgcccgttaattgatgcagtttcttcatagagtcaatggtctttaccatttggcatgtttttgcagtgtctggtaccagttgttcctttccatgtttagtgattccttcaggagctcttgcaaggcaggtctggtggtgacaaaatctctgagcatttgcttatctgtaaaggattttatttctccttcatttatgaagcttagtttggctggatatgagattctgggttgaaaattcttttctttaagaatgttgaatatcggcccccactctcttctggcttgtagggtttctgctgagagatccactgttagtctgatgggcttccctttgtggataacctgacctttctctctggctgcccttaacattttttccttcattttaaccttggtgaatctgacaattatgtgtcttgaggttgctcttctcaaggagtgtctttgtggcattctctgtatttcgtgaatttgaatgttggcctgccttgctaggttagggaagttctcctggataatatcctgaagagtgttgtctaacttggttccattctccgtgtcgctttccagtacaccaatcaaacttatatttggtcttttcaaatagtcccatatttcttggaggctttgttcatttcttttcacccttttttctctaatcttgtcttctcactttatttcattaatttggtcttcaatcactgatatcctttcttccacttgattgaatcagctattgaaggttgtacatttgtcatgaagttctcatgccttggttttcagctccattaggtcatctaaggtcttctctacactatttattctagttagccattcatctaacagtttttcaaggtttttagcttccttgtgatggattagaacatgctcctttagcttggagaactttgttattaccgaccttctgaagcctacttctgtcaactcgtgaaactcattctccatctagtcttgttcccttgttggcgaggagctgtgatcctttagaggagaagaggtgctctgtttttgggaattttcagcttttctgctctggtttctccccatctttgtggttttatctacctttggtcttcgatgttggtgacctacagatggggttttggtgtggatgtccttcttgttgatgttgatgctattcctttctgtttgttagttttccttctaacagtcagatcccttagctacaggtctgttggggtttgctggaggtccactcctgaccctgtttgcctgggtatcaccaggggaggctgcagaacagcaaatcaggctgcagaacagcctgatccttcctctggaaacttcgtaccagaagggcatctgcctgtttgagtgtctgttggcacctactgggaggtgtttcccagtgaagctacacgggggtcagggacctgcttgaggaggcagtctgtcctttctcggaactcaaacgccatgctgaaagaaccattgctctcttcagagctgtcagacagggacatttaagtctgcagaagctgtctgctgccttttgtttactatgccctgcccccagaggtggaatctatagaggcattaggctttgctgagctgcagtgggctctgcccagttcctgcttcccagcctctttgtttatactgttgagctactcaagcctcagcaatggtggacaacccccgccatccagctgcagcatcgcaggtcgatctcagactgctgcgctagcagtgagcaaggctccatggtcgtgggactggctgagccaggcacgggagggtatctcctggtcggccggttgctaataccgtgggaatagcgcagtatttggtcaggagtgaactgtttctgcagatacagtctgtcatggcttcccttggctaggaaaggaaaatcccccaaccccttgagcttcctgggtgaggcgacgcccctccctgctttggcttaccctccatgggctgcatccactgtccaaccagtcccaatgagatgaacccagtacctcagctggaaatgcagaaatcacccaccttctgcatcaatctcactgggagctgcagaccggagctgttcctattcagccatcttggaagtgactaccatggtcttctttattgactgtggaacttacccttagaacagtttctcaaatcatcttttgattgattgcatttgtgcatctgtttgtaatttttatttttatttattttttatttttttgagatggagtctcactcaggccctgttgcccaggctggactgcagtggcgcgatcttggcttactgcaaactctgcctcccagattcaagcaagtctcctacctcaaccacctaagtagctgggattacaggtgtgcaccaccatgcccggctaacttttgtatttttagtagagacaaggtttcaccacgttggccaggctggtctcaaactcctgacctcaagtgatccacccacctcgacctccaaaaatactgggattacaggcatgagccactgctcccagcttgtttgtgaattttttttaaaagagggactctcaaccacttttaactgaactattttgtatttgagaatgccaaactgttgcctttaaatttgagaaacattggtgactattttccccccaaaactcagagcctttgccttcaagtaaaagatggtttcatttttcctgttacagtgattatatatatatatatttattgatttccggatgttttatgattattatctccttaattaatattctcacaataattctgcatggactatactgtctttcctatttcattggtcaagaagttgaaggtaagagaggttaataattcataaggtcatacacatataagtagtgaagtcttgatgtgtgcataggaccccttgtttccagtgtcttccctctctcttctctgccatatgtcttctcctggatgtagagaatctgggaatgaggtaaaaataaggctatgtgagttgtggtcagtttgggggatcagaaagaaaaagctgatttttgccttctaaattctattaccagacatgtaagaaaatactatttccaagaatcctgaaatcaaaagtaaataatgccattgaaattagagaatatttcttagccctatgctctacgggaagatttcttttgaggttgacagtttcttggaattctgatggctgggcataatgcactttgctctgtcatgttactgtaaaaaatgtgttctgtttaggaaaattaaaggcattacatcaagatccatagtcttatgtcagctccattatcttgaatcatatttaatagcaacatgatatttctggttatgaactctcctttggtttggtgtttaaagtgtgtcttaagcctaatcaattcttgtgactgtatgttctacaaagtcaggtttcttgagtcaaatggtgaagcattgagcatctaagagcagagtctagaatagctagaataatgatcacacacacacatgtgtgtgtgtatatatatatatatatataatctgataagaattaatggttcatagatcacaaatggaatacataaccctggtgatcatttcattacttgtggtctccagaaaatgcagagaagggatgttaaattatatgatgtatgaaaaccaaaaggatctcttttgcacggaaaactcaagttgcaggttctgcctctgaactctacacgttcagaaagggtggcctgggtcttcagagtgagtttgaaggcagcctgacatgccatgtccctacgggaccttccacagcacgcatcctctctattacttcttggcacctcataaattggtgacattaattatttaattgattaacttcttacttattaatctctacgaatagaattttgctttaaaagggaccggtataccctatatattgtatagttcttggcacatataggcattcaaaaatatttgtaaaacattatgttttctgtaagtcttgtcttctgaactaagttataaactaccaaagaacagagtttatagttgatactctgaatggcccattggacacaatagtgctgagctgagagcaggatctcaagggcaatttgttatactgagttgaattataccatatggaactacccacatgaaggtctgccttcctggcttctggctctgtgcttccatagttctttgtacatgcttcttttatagcctctaatcaacccttttttaattttttgttcctacatctgactgcctctcaatattttgtgctaagagcatttatatctcctttcttcgttgataattttgcacattgcaaatgatgaataagaaaatggaactaacattatattaattggctgctatgtcaggcatgcggctatactatggactttacagatgtcaattcaattaatcctcaaaatcctatgaagttggtagtttaatcttcatttaatagttaaaaaaactgaaactcaggagttgcttgcccaacatcacgtatctggcaaggatcaaagcagagatgggagcccagtttttttcaattctgaagactttactgactcttctactgcgctaatccgtttttgcattaattaatgagttaacaaatagcaacagcagtggtaggtagcaactaaagctcttgtgttcattaacaatggagctggaatacccaatatgttcttacaagggaatcgttttcatttcaaactgatatctctaagcaatacccttggaatcatttgtgttgcctcccttagaatagtcatgttgcctttgaataacaggaggtccttctcccatcttgttgagggaagctacatctcaacaaggtgggagaaggacctcctggagtcactgatgataacgttctttgggaggtttagtgagaagcttcattgctgagggagagggggtgtcattaattcttgggttttaggagtttaaaggaggtattattccagagagggatggggaagagtcagacgtgaggctgtccagtgatgggtgctttacaacagcagtctttagacttggtcagagttacttgtggacatactttttaaaaaatcaggtccagaaccttaattttcatatttcgtatttacctgaaatttatctccctgataacttgcttgcatttaaaacagagctttttctactttaaaaaagaaagatgtttcttcatccatctcaaatcttacaaaagtgcacatcctcccagacatctaaggggaaggtttctttcataagtaagttgccatatatcctcagggcttttagtctttcatgcattaaaaatgtgttaaggttgatgtacttgtcagaaagagagtatttgggtgctgtattgggatttctgatttcatatctatggtagagtaagagagtggactaatgacaatattcacttagtcatgtatcctctttcacccatcacctattgtcaagtaatgcatttctgttaaggtagtgtattaggcctttcttgtattcccataaagaaattcttgagagtgggtaatttataaagaaaagacatttaattggctcatggttctgctggttttacaggaagcatgatgctggtatctgcttggcttccagtgaagcctcagagagctttcagtcatgcagagctgaagcaggagtaggcacttcacatggcaaaagcaggagcaagcaagagagagtgggagagatgtgccccccccgccacccaacttttaaatgaccagatctcatgagaattcactatcacaaggacggaaccaagccgtgaagtattcactcccatgatctaaatacctcccaccaggccccacccccagcattgaagatacaattcaacatgagatttggacaaatatctaaactacatcaggcagagtcctgtaagagtgaagaaaaagactcagtaagaaacactgaatatgaaaactggctttttccccatttttttcccagctctggttaatacttatttttatgacctccattgtgctaaaaagaaaaagattttcaaacagccaaagaattagaggttcttttaaggaatttggaaagtgttctagaattatcaaaaaaaaaaggtaggtgatattcaattaaatcaaccaatttaaaaaattacatatgttttcatgttggtgtaatgtaaaagctctgaagcttatttttgaaatcaaattacaacattttcttccaattgcaggtaatcctaatttggtttaaattttctacctgctattgacaagaggtaaatttatgtgccaggtgccagacctatcagtttttagtagtatatatctttctttatcataaagtatgcctcagactaatctatctttcataatgtgatctgcaatttactcagtttttacaatattcctctgaatacatattaacatatttttgagttaaaaattatagttggtttgtggattggtttgaaaatgagggctggcttagccaacaaggttatatgttagtttatccaatatagttaggatatattaatttatgcccatgaagtgactgagccaaatcatcagtgccaaggtttatacaaaatatacttaaagcatttgaaaagataaaatattgcaccgaagatattgtttgcaagatatgttgcaaatggaatttgcaacgttttaatattctcaaaactttctaagattagaaagttattcaggcacctctaagtgaaagaataaaaggcaaaaacagcaagtcttgctaaaatgaggtaatcaagaaaatggcagagaagcaaatccttttggttcatcaggtcatttttcatttatttcagcaacaagcaagtaggatactgacatgtcctcttataagacagttagattaattaggaaaagaaaagagaattggctgtgtttgcactctgagttagcagagtaccaggtattcagttacagaaacagagagttgaattatcagtgaatccactggcttcatggaacaaatggtttctaaatattcaaatgttttggtacctgacaaatgcttaagctagtttttaaaaatcaacttcaatcattaatttaaaaaataccttaaatgctgcctatacagaggtgtacccggctctggcgaggggcattgcacaagtcagacacaacctcagtcctcagccacttatcattcagtggacagtgttcaacaatacacagaagagtaaataaataagctgatataagactgtgatattcatcgtgaacacaataatccaaaggaatgtggtcagcattatctggtaaggacagcaggattgccttagcataggcagccagggaagttaaaaactgggctgaagtgacccagtttttacttctgtttcgtctctgtgacctgaagtggcagccccgtgagaatccccaggtgaaggtaagatgcagaacgccatgaggtggggatgaacctggactcttaattagccctgcatctcagattataagaataatcttccattttaatgggtctttacaactgacatgggctttatagatgctgagatttctgagttccatagtttgtcttacgtgttcattctgcaagaagtagtatttctagaatctctactgtgcatagactctccaactacaagttttccttccctgtggtctgctctcaaaattagagataaaaaatacaacttttatttttgtgtaatcatcaggtaatagatgtctattgtgaacatgctggtggaaaaataaataccaaaaaggaaataattaaagcttataagaaaataatactgaaatatgccaaataataacaaaatataataaaaaatataaaaagaaaaagaaacaccagatggatttcccattcttgaaatgaaccactattaacagttgtgtgattttctttgtttctaatcttcaaaacaaacatatacacccatacaattacacatatacatataatgaacagtgcattttttcccttcaatttcagtttaacatataaatctactatctctctatctatctatctatctatctatctatctatctatctatctgtgtatcaatcatcatttatctatttatctaacatcacatcacttctcaaccttttggctaagaacaagtgtagtatctgttcttatcagtttaatatctatctacctacctacctacctacctatcatcagatataaaagcggagaaggtaatggcttacttggtgccattataggaacaacagatgtcttggactgcttctttgattaggcctaatatattgacaatgttacttctttgtttaggttaaggcattaaaaatttattcataaaataaatcaatctattcataaatagaaatagtctttttagaaggcatcactttaatgcattataagtcaccctgtcctcacctagaatgatctttttatatcagtcagccggcacaaccctgtcaacatacttctgagcatgtgacacagacattggacacgaatattatgggactagaacaacttaggaagtgtgtgagctataaagcctttattttttttctttcacctccccttcctatttccctagaaagatctaccatttcttcctttttgtctccacatatgtttctttgatggcacatatgtcttattatatttatttgagtggcagaagtaagtttcctacgtaagaggcggtatagaaaacaccgaatttcttaatttttaaaatcaatctagatcaacccttgcttgagagagtatagaactaaatcagtctcctttctcctttctgcttctccctgtccctgtgataacagaagcacctactgcttacctgagaaaggtggaaggacgtctatcatgccagccactcatggacgtgcccgtttcctgaacccttttgggcttctccagggcatatggcgatttccaagcaggcgactccattttcttactgtctactatgaacctagaactctttcaccagtgggttgtggtctcatcatttcccaccaaagcttttcctcctctggtgagaaagacattgggtattattcacagaaacccccaaacctaaaaccattgttctttcccatggtcttcaggtatctttcctcttttaaaactccagcttcggtttttctcaatggttctagactcctaaagaaaactgtgggttaaaaaagatgaacaattgccctgcaacttctgcttttgtcccagataccaagtttttgacaattttccaagactatgaaagtagcaatatgaagaaaattatttcaacttaatttccagttgagatgtgagaaaacagcaagaagttagcatcacaataaataatctagcacatttgtttacatgtctatgccactctacagcactgcaaccccactagctctgggtccctcaaaagaacatagaccttagcaaatagcaatgtgtccctacaaatgttcattgaataaataaacacattcattattacttacagcttaaaaccacaataaaacacattttgaaatttccttgtctctcagtgacctacaatttgaggatgaaagccctatatctggccaagtcagtttttcccactttctagtgaaagtggagagtaaaccaaacctttgtacatcaatattttgactgtgtaggttctgggaagaataataatttgagagcctgaaacagtacggaatatctgggtagctgattattttccttgagaaagaccttataagcaggcataatttatatcaactttatcaaagcttctcacattgaagaattagttgatgcgagctatggctgagacctcaaggagagctgagacatcgtggtgggctggtgaggaggaagcagaggcatctggagtgggaggaattttcagtgctttgtgctgaccccttgcatagggaaggcaatgggtagttagcaatcaaataggtgttgaaatgtctgagaaaactcagggtggctctgggcttacctcagtcggtttcctaggtaagctgatcctgggggtggggactggggcaggaatttctagtggtgacaaggatcttctgagttattttgaatgttgcaggaaggtgattttacagttagggcatttatcaagtaaattttaattcagtattcaaactactaatgttataaagttcaaaacctagatttaaaaagcctttaagtctgcatgtaatttcttaacttctttaaatagataattaatttgagtggtatgtttcctttttgttttagaatttcagtgggagccttaaaatgggggaatgatagaaaagtgctggagttgtctatatgggagttaatagaaaatatcaaaactggccctgggaccctcatccccacttcttcatcagtccatgtaaaagaggaaaataaaggccgggcgcggtggctcacgcctgtcatcccagcactttgggaggccgaggcaggtggatcacgaggtcaggagatggagaccatcctggctaacacggtgaaactccgtctctactaaaaatacaaaaaaaaaaaaaaattagccaggcgtggtggcaggtgcctgtggtcccagctgctcgggaggctgaggcaggagaatggagtgaacccgggaggcggagtttgcagtgagcagagattgtgccagtgcactccagcctgggcatcacagcgagactctgaaaaaaaaaaaaaagaaaaagaaaaagaggaaaataaagtatgggaagacagaatgaagggaattaatagtggtccagagcccttagaattttttccttcctctacttgccctatctaactgaagagggctcaaagaattcagtcgtagagactgaagatgcctgtaagggggtggggcattgatatcttaccctctggctgaaggtttgctgagatgcagatagagcccactgcatggtgagagagcgctctcgggagaaccagacatatgtacctagtggtgaagaattctgaagcatggaggtgagttgtagggacccatgatgccggagcaaggagagatgacagaagtcggaaaaagcctatacttccacagtttgacaaggcaggaatgcatgcaattccctatgcaaaaggaatgtttaaggcacacacttggctgaagctaagttgaaagactttctgcacaagaagtcggcctgcacagcagtgccagaatcctgtgcttaagctgaggttgaaactaatttacttcaccacttcattttatttaggtactctttattgactgtgttctacaattccccctaaaataactatacaattctctagtcatcttcctaacaagaatcacaaaggagactgtagtatagtttcaaatacccttcagtttgaagcagaatcttaatcctgcagcaattagagagggattaacccacacagggaggaactgagaagaactaggtcatgtatcctggtgaacctcagggaagaaggctgggattcagggtagtagaagagtatatctgaggctctgggataaagtgatacaagacatttctggttgggcgtggtggctgacacctgtaatcccagcactttgggaggccaaggcgggtcgatcacgaggtcaagagattgagaccatcctcgccaacatggtgaaaccctgtctgtactgaaaatacaaaaattagctgagcatggtggtgcgtgcctgtagtcccagctactcgtgaggctgaggcaggagaatcgcttgaacccaggaggtggaggttgcggtaagccgagatcatgccactgcactccagcctggtgacagagcaagactccatctcaaaaaaataaaaaataataaagaaatttcttacataggaaggttgtggtcttcaagccttatctttctcctcttcctcctcctcctcctctttctcctcctcctcctcttcctcctcctccttcttcttcttctcctcctcttcctcttcctccttctcctcctcctcctcttcctccccctttttttgttgcccagcctgattctgattccaacattttactcttaaaataatcttgtctaattgaagattttttttggagagattggtataacaatgattttattagcttttctttgtcagcagatttacattgcttctaaagagctgtatcaactattccttagtttaatgatgaaaatatgattgctggaatcagtcaacacctccgtgggtgtaacctgaacataatcaaaacattgctgggttctgactgaatgaaagcaaggtgtggtccaattgctctgaatatcatatcagtgttgaaaatcacaggtgtggcctgatatgacaactcgtgacataaaatgattttacctaatagcacataaattttaaagatctgataatagtcacctcaacaggaaaaagctaaaaatatgtgtgtgtatgtatgtgtattagaaatatattagataaaaatatgtgtgtgtatgtatgtgtattagataacttatgcaaaccacaattatatgaataaaatatggatagtttcaaatcaatagagtgttctgcggtcttatgtagaatttgggagtagggaaagggaatgttgttcaaagtctatcatgaccctatgcaatggtcctttaaagtagacctgtttgtaagacactaagcatgtttacactcaggggctctgggttgtcaaaaagttggtagaaataaggttgaggaataaggttacttactgttgataggtacataggaacactttatagacttaaggaaacaagaccagttccacactctataaaatggctaggcttggtctttttacatattgccaagcaaagcttggattgcgttagtgtctggctacagctggaccatgccacggaattcctctgtgatggcagccaaccacaactgggaaaagagaggaactattagacataaaaaaagaactggaactagcacatagaattagtgagagagcaagtgacatagcagatagagttataaaagcaatagaattatgtgactctagtttgaattcactgtttcctttatcactgtaagaggattggtgccctttcccaagataaaagaggcaagtgaaaagttactcaactggagacaataactaggattttgtacacttgaaaggcttttaagattttcttggatacatatttatggcagaaaatatttgttttgctcaaagttttctaagcttttgcaaacctgaagtcattgtattaatcaagaatgttcaactgcaaaatatggagcacatggtttgtcctagattaaaaacctaaagctgcatatgccacccacacataagaagaaggctggcagtaacagtccagggcagtgggtttagcaatgactccagggacccacgttcctcccatgtttctatgcctcattcttagtgtcttggcatttatgcttatgtatgctgctctatgggcactggaagttgccacatctctaggctttgtgactgcattccagacagaacaggttgcttcagcagatttctgcttatatcccagacctatgttatatgcccacacctagctgaaaagggaactaaataaacctgtttccagcttttaagtccttgagaacagtcaggaaaggagaagcgtattgaaagtgcaaattgaggctgggcgcggtggctcagcctgtaatcccagcactttgggaggccgaagcaggcggatcacgaggtcaggagatcgagaccatcctggctaacacgatgaaaccccgtctctactaaaaacagatacaaaaattagctgggcgtggtggcaggcatctgtagtcccagctactccagaggctgaagcaggagaatggcgtgaacctgggaggcggagcttgcagtgagccgagatagtgccattgcacgccagcctgggagacagagcgagactccatctcaaaaaaaaaaaaaaaaagaaaaagaaaaaaaaagaaagtgcaagttacatcacccagcctgtagtgttggcccacagccattccaaggatgaatattatataagcaattattagatcacacaatatgtactgaattattaacatttctcatctcctaaatatagtaatatgagagctggtggttttaaatctttcttgcttttagcctaatttatcttagcttcagcccagtttcccctagacctgggtctgtggttctgtaaagaaatggcaagctgagttatactcaggcatagcaattaaattctattgtgcatgccagctccagtcactggaaagggctggccaggctgccacgtagaaatgaattctgaagttgcctagaggcctggcaggaaagtggggccttgatgttttgccatgagagaaaatggagacaatgttttcctgtcggctgagtgtgtgttctcccttttcatacaaaattcagttatactgtagacatttccctggaaagtgtactagttttcctctttcctcctgtaattcttttaacaccaatatttttgaagaaagggaaatggatgcttttgcttagtaaactgagttcaactgggaagcccttacgttgtagaaaggaaggccaggttgacagtcagctacacttgtttctttgagtttaagaaatttacctggcggtatcaccataaattctatcttctaagtgatgttcaaagaagtgactgtagccacattaattttgttgcagtttgtgctatgattcttatcaccaattatcagttggagcaaagctttatgcccaaattagcaaccttaaatttatctacccaaagctatttttgttcaaaattacttactcatataaatgaagtcatattccttgtattagtctgctcggctgtcgtaacaagataccacagactgtgtggctaaaacaacagagatttgttttctcacagttctgaaagctggaaagtccaaggtcaaggtgccagcaagatagttttcattctgaggctgcttctcctggcttgtaggtagccgccatcttgctgggtgctcacatgacctcttctttgtgtgtggtgaaagagagaaaaagctctccattgtctcttgttagaagtctcttcttcctattgtatcaagaccccacttttatgacctcatctaaccttgattacctcgttataggacctatgtccaaatacagattaggacttcaatatataaatttggggaaacatacatcagttcatagcatctctataaaataaaattatagggaagttataattctaaaacagaagatatattttttcattttagattcaataaaatatcttttattctaacctgtatcgtaagtcatgatatcctctgtccacagaaagttcaaggtctttagaaagatttgtgaggaagcacgaaaagcaatccaaatccgtttattttatcagagtcttattttcagccagaattatttagcttgagaggtcaccaagaataataaatacaagtagtccaaaggttaagttattttcttccacacaaactttaatcagttttatgatttttaattcttgttttaattagaaatcagaggatattgaaaatcccctctaatgagcttttattttatttttttattttatgggagatgatttaagtaataaggcttgccaagtgagtatcagtttttgatcaaggaaatagttctgagctattcaaaagagtatttaaaactgaggacggaaacaagcctcaaattggtatatttattgttgtgatttagataaaataattggactagaagtttagaaaaaaacaacaaaaaaacagtttcacttctgattgtctctcttctcctcgaataagtcccaagagaagaatgcctcatacaaaactgaccagtacctaggactggagggaagaatatctgggtttgactataccaccaatactcgccaggtgtgtgacttcggacagaagatttaactcttttgagcctcaactttcttattcataaagtgggactatgaatttctgtctaaaacatacgagtatatatatatttagaattgtgccagtcatattactggtatgcagtaaatttgataagaagtcctttgtggatagatatgtataaaactcatagttgtttaactccaacacacttttaatttttggttaaatatacaggcactcaaagaatatttgctgagtcaatgagacaatctattataaacaagtgacttatcatgtcatttcctttactccaatattcagagtttgccccaatggatcttccagccttggtagtttatgacattttgatacagaatagaattgaaatctacaatttttaggactggcatcaaggagcagcaaataaaaatctcatgttagtcaaggcaaagtttgtgtgaatgaataagccattaacactccagaagtgtgagcaacagttttctctttttggatttcttttgtccaaattacaaaagtagtgcatatttgttggagtaaaatttaaacaaattaaatcctctatagaattctaaaaaatagaggaaagcctggctttctttcattcttatactccttcttatcctacttcctaggattaaatgatgataaaagtttgatacatatttttatcacagctctttctctccgtgtctctctctcatatattcatgcaaagaaattgacaggtagggtttttcttttaatgaattatattggacagtaagtagatttataatttataaagaagggaacacagagaggcctcccaaagaacgactccacattgtttaatttgctgtagtgtgaaacctgaagggtgtctgggactgggccagatgaatcagtttttgcccagaatggctcttcctggttcaccgcaattatatcacacaaatgaccaccttctccacatctatcctggctggcttgatattaatcagtctagttgaggtctgttcctttttactaaacccaaatctgacattaaatattgaaactgttcaatacatcaataggacaatcggagagggctgttctttttactttgcagttcccagtgacacagaacagctgaaaatctgatcacaacatgccgttttgagttcacttaatgttccctatctcctaggctccataaataaagaatcagtgtttggagagtgatttcagggtctcgtccatcttcagtgtctttaaggatggaaaacctgaattgcagggtcggcaacattccgcagtctccggcctgagagccaaaaagagtgaagagattctccctaaatctcaggcctctctctggctgggtattgggcacagattttaatcactgggtgtcgtcgacccttgagtgccataacctctgtgcggatgaagacattacttttggaggggtaacagcatatatctgcccacagtcttaggtctattttttggtgactcttgtatttgagaagctcctgctatgtcagaatcataataatttttcaaggacattttatgttttctaaggtttgagtcctcatcaaccaggattagaagagacacgtcaactttcactcccttgctgttttccagcacatttaacataatgctttagaaagagttttcacaaacagtaaacatctgtgtataatggggtcgacattattcctgacttttcaacaatagcctagtcaaaatcctttatcatcctatgttgttcaaattactagcaccaatttcttctttcactcctccatgtttttcctttttgggtttccattgatttgatgacttttcttagctttttgttagttgcttgctccagtctttttaacctcttctagagactgctctagaatttatccagaaaaccctctttgctcttctttagtataaacaccactcttaccttcagcttttacaattacaacagaatagctggacatcactacagaattttttatttttttttggtagattttctcatctggagtcctatttgaaaacgtactttttgtatggtccttactttagatccattgcttaagaagttttggataagtgatttccaagatgattgtaacatttagagagagttggccacaagtgtgccgtgcttttatttcttaatttaacaattatttatgaagactttacaatgtgttatcaagccctgtctgaatccagtttttttcagtgaaattgccaactacatgtttggtccaaattagagacctctgatgtgatctctcaggttgccagctgaaggcatgtgtacaggctttctctgccgccatgctctgtgccttggcaactgctctcatcgggcaaatgccagggctttatgttctgccttttatactttcaccatccactctgtagctgtacttcatcattattggagtaggaattatatacatttgcacatttttcctgaaacatggtcactaggttgcaaagaataaaaacccattcaaataaataaagcaaaaattgacgaatcaatgggaatcttctgaagctaggcctcacagggcctgtaaccaggaactggaggactggggccagtcccacccctcagtgtttctctgctgatcttcttgtctctccttcagctgcaattcacattgtcttgactttggcaaatgtcgggcccagttgtgattgttttaaaccctacccagctactcagttttaccaattttaagttttcagtagagactgactagttttccttttttccaaatataactttcagaaagagaagtttgttttgtttgtatctctataactaattccattagcggaaactgggggtactgggctcatgaggtctgttgatttcttaatagaggctgttggaacaagttttctgagaaggagttaagaaagttggaaggacaagattgctgcctctagtacaattctatacacacgcacacaccccacatatgtacatatatattatctgttcataaaaaagatatgcagattacaaaatggaggttgagaagccagcataatacagaagaaaaagccttggagtgggaggaaagagtcatgaacgcttgaactagctttgtgagtaattgctggtgtcactttctcatttctgaatttcattgtcctaattaataagtgaggaatgtactagtagttggttatgcaccttaacacccttttaaataaacgatttttaaaaaaatggctcttatactacatttcttcttttttcctatgttagtggttctcagactttttggtctcagggactcatatccttaaaaaaacaaataaaagattgaggaaatccaagagcttttatttatatgggtcatgtttattaatgttgactgtattaaaaattaacactaacgtttagaaaaaagtgtttattaattaatttgaaaatcacaataatatgctaattgtgttttaacgtaagtaacatttttatgaaaagtaacttatttccaaaacaaaacacagtctcttcaatgtctgcattgaaagaaaaacagatggattttcataactatttctgcattcaatcttttacagcttgttgttttcactgaagtgcttgaagaaaatggaccttatgcagaattgtagttggaaaaggcagaaatattttgtggcctttttagataattgtggttctttttctttggtagcacaccacaactctattaaaggtagtttcttaaaggttagtggcaatataggatctgaaaccatatctattaactttttactatgaaaagtttattaatctattttgtactcttttacccatgcacatttctttaatgtcatccattggtcatttggaagatgctgacttacctactaatttagatcttccaaatatcaacaattttcactatacaacgttgagaaatcatgcttgttaatacagttaatacaaccacacatgtcatcagaaaagtctaagtattggaaagaagttaagctcccatgacagttagaaatttcctgaattctaattttggcttgaaagttcctattttaacactggccacagctattgtcagttgttttccttaaagtgttaggctcactttgttcattttagagaatgtatcaggcaaatattcaagtgtgaataatcacagtgtgcctgtcagttgttctttcacataaaagtgtcatttcattaaaaagcagctcatcaacttacaacttcactgtacaaccattgtactttgattagtagtagaagtgttttatgcattgtttcaccaagaaaaggcttttgacgagttcgtctacagaggcattatgagaaaggctatgtgggaggtgaatattttgtgatttgcatgtctgaagttaattttattctatcttcttatttgattgatagttttgctagttacagaattctgttagaaatcattttcccttagtgtgttgttccatccagcctgctagtttccagaattgctattgagaaacccatggctcctctgatttcttattgttcatacataacacttttatttttcctccatgaaagttcttagcatctttgtccccagtgctctaaaatttcagaatggtgttcctcattcagggtctagttttactttttgtgttggacattcagtgggcattttcaatctaaaaactctggcccttctatttctagaaaatttaagtcattatttggttgatgatttcttccctcctgttctttgtttccctttctttctagtactaatatttaggtatcagaccactgcaaacaagtcttctaattttgttatcttttccatctctttaaagacgctctttttatatgggtttcctcaactttacgttatactgatccaaaaaattctgatatcacatttttaattactagtgttttatttgaattctcttttattttttaaaacaacattctagccttgtttcatggatataatagccactgttactactcttaataatagtttctttcatttttttctcccttcatagtccttgcttcctccaaggacttttttctatttatttgacttggtctctatattagagaccttcctccaaggacctttttctatttgttttacttggtctctatattaaagatatagaatttcctcgtgtctaataaccctcagttttctgcccatgatttagaatagaaatgtaaaatgtaatcgaaacctctgcgcacatgaatagggtttgcagactttggtctccttggcagggtgatgagggtgagttgttagagttctttgatgttaatgtctttgggcttttccttggagcagactcttccaatcttttgtattgaaaatacaggtctgcctaccagagttttggaaataaaaaacaggaaaggggtaggttggtcagcattccatagtcacttggccacatcatctcactgttcttaaaagactgtctaggttttcacatgagtctggagtccttttgtgctgataccctctatttagagtctccagaattgaaccttccagaaatcttttgagaagtctccagcattttgccagagtggaggatgggcagttgtctatgggcatagagtggggaggggttccagggatctattttttttctcaaataatgttaaaccaattatcatcgttctcttcatctaaattacgctttgctcccagttccagagatatctggtgctgtcacttcctgtaccttttgatgattctgcagtgcaaatatggttgtttctcaattttctatagtaccagcttaagcttggactgattaattatttaattaagtctgctgaattattcaatactcatctttcagtcttccaaaaatttgttgctgttaaatcttctctttttatttccatccttataagtttatgtcttccaaaaaatatttacttatctagtgggtgtttttaggtactgccaaattagatgcatgtatccaattggctatcttttcctggttttgacctttcttacatttaaaaggagaactaaaatgacttaagcacctaagtgttggacatttcaggtcaccagcaagagcaggacaaaaacttgaaactttggcgatctttaaccatggaattcaggatgctggttctctaccaagtgggctttatactcttctcaaacaattatttaactccacttctgtgaccttctttagctagatccttatttctctagaaaatcgtttcatttctctttggttcatttgtgctcaattcttctcagtaacagttttaatcttccactactctcttctagcccaatcccatgtctcattcgttctcagaaaattatgcaaactcttacttaatatggaatctgttcatgtacctctagttctcacctggatatctagacagatctgcagcttgtagctggcctcacatgaacttccttatttccagtctcagaggaaataaaaagcttcttcctcatagagactgatcttaccaccagaagtctgaaccccatctcctcagatttctcctgaaaattactgcattattatttccaccttattcctatttccacttttctacctcaaaaactcccatgtctcacttttgatgacccagctcatgcttcatgtcctttctgaagcttctttgaccgtgtacactcagaggtggttgcttcatacatggcaccaccatttgacctcattgcccccatacttgaatgtgaactcagtgaagaaaaagatcgttattgctcacttttgtactgctaatgcctaacatgtttcttaaaacatagtaggcatgcacatttttctctcaatcaacaaatgaatgctttaactctggtgctaagagctggaaactttttgagttcaagcagtattttaatcaatattctttagtgagaaaacattattagaatattctaattctaaatcattgtttaacttaggagctcaaaaagaaaaaatactaatggtgagctatcttgccacctaaatacaatgaccttttatattgtaaaagtgagaataccgttttccgcaagtataatttttgcaaaattcagaataaaatgcagctttttggtgttgtttcccccctgttgctgttactccggacagtatgtattttgcttaaattttctaatcaggtcagtagtacatctgctgtttcattcccatgctgactcatatctgatagatttgtttaggggaagaatacagaaaaatttagtaatatttttagaggaaaaaaatagtattttctatagaatttatgattttatagtatcataacttttatttatctggggttattacctttcccgagcataaatttgcctcctcacagccaagtttcttaacagtggtttatattccatgtgccattttttgccttttatttagcttttgatccattgaaatctagtatttcttttacctttccacaaaactgctcttagcaaggctaaatgtgacctagttactgctaaactcaatgaatagattttgggtttaattaatgagttaagtaatataacctgcagtttgttgttaatctatatgcatgtgctgaagtgtttcatgttatataaagaattttgaaccgtaatcttatccctcagagaacttatggacaagttaatacacgtaagaacaatacagaactaagttactaaaatcagaatgtgattagtaccgtaaaagaggcaaagataaaatgtgaaaaaatcaggaagaaaatctgaggaaagaggcaacatttagatgggcattgaataatatgtagtaattggggatggcaggaagggaataaaatgagcactttcctaaccttattttgttttccaggaggtcaaagtcaattcttttagctttgattttaaagccttctttgaatgaggcaatgaagaggctggaagagatattttgaatttgggtactttacttgccttttccaaagactacaaacatttaatttgctttaagactgctccttgaatttttattccagaagacttgccttatgaccataattttgtaagatagaacaaaatttccaaaccagcactttgttctcttatataatgtacaaaatgctgaagttacaaaccacacctgccatggcacctccttaatgctgccaaggtagcagtcagcctctgagttgggcactatctgcagttgaagactgtttaccacagggaaaggaagggaactgagtcctggcaaacactggttctgcattccactgctttggagatgtgggatgcacagtagaatccaggactgaatgactgccaaagctccctaaaaattataatgattgttttattgggctcatcaattatctaccttacatgtgaactccttttcaggtcataaatgttgcgacaacactcagaacaggaagaaatgaaagcaggagaaatgggcaatcagggagcaatggtcaaaattcctaataggcagatcttgggaccttagaatagtataggctggcttgggggactgctgtcactaatagctgaactagatgaagtagtctgtccctgatgtctggggaactatagtgcaatggattttatgtgtgcattctgtcttcacagtgatttatgactttggccatagagaaaatttattgaaggcatttgtcagggattgtggagcagattgttatgcttacataaagagttacctccagtgtttatttctgtgtgttcatgaaagcatctgtatctagaactgaacatttctaaggcacttttgggggtcttgtttgctgagttatttgcaactggagaactgagggtgaggaaagctccaaaaatcccttatgaggaaatcatggctatctattttagtgttttataaatttaggatttggatcacattttcagctggaagtttttgcagaagagaattattccagaaaacataaatgtcaccattagaactgtgtaagacaatgacagtagcagagataatgttttgcttttttatggatgtggaactccacttggggcaactgataatttttgagatgtttgtgtttggttctggttagcaagcagcagggagtggaacctgtcaggaatgtcagtcaactggatctgtgacagtcggtcaccctgaggttggtctgcatcatacagactatatatccagtgtacttggaagcaggcagcctccaggataagagcaaattatagtcaaggatcagctaagaggacagtttgaaaagtttgtggtgatgatcaagagatgaatagtggaaaaatcaggaagccaaatccagtaacgggagatgcaaagaggggcaattcacacttgtcaatgagtgtaggtcagttcttattggatacgggaatggcagccagctctaaagctggactggcataggctagtcaataacttcacttatttgttgattctaatcctgctctcacgttctatgtggttttagcaatacctcatgagagaaagagtacaataaactacttcattaattaatttggacgataaattgaaaatgtagagcgagcacttcccactttctatgtgtttgtgtgtttggttggaatattatgggacataagtctggagaggtggctttcagacagtgaatcacacagtagttgatcatctaatgtaaaagcgagtttagaaatttgtgttctttttctcattaaacttacattttattgctacttgagaattcataatactatatttgcttttttttcagaaagtccttcaagtgattactactgaaagaataagaaaatgtgagttttactttttgttgtattagtacagttacaacggttagtaggataaaataactttttttattcgtatagcagaatagttaaaagtatgcactcttatgtagtcaggcctgcctgctctgcctcctaccaatggctctggcctttgcagagctatatgtgcccagcaggggaaatcctcatagctcacattcaactctggtatttccccatatgcaagtgttattatgggtctgtatcctactcctgaataactcaggaaaagatattaggaaagccctgttgataacaagacacataggataaagaagttctgtcttatatttacctgaagtagctttgaaattaacttgtcacagtctatggaccattaaatataagcatgttggcatcttaaggttggatggcagagataggcatatatctctgcatatgaaaaataagcagcagtagggttatggctatcattagggttactcagaatgctattctgattttactgctacttgggtgcatgctgcacgtcactttcttgttacctaaacttgaatgtagccatgagagtggctttagccaatggaatgtaagtagaagtgttttgtgtctttgctgggcataagcctttaaataagagcatgatttttcatgtttctttccttctgccttgttgattgtgaaagcttgtattaagatggggcctttatcagcctggatccctaagactgaaagagcctcacgtgctcttcctcccgtgccaaccaggtattggcatgctgtataatgagaaagaaaccttcattattttaaaccactgggatttagagattacttataaatgtatttatttatttatttttattttttgagatagagtctccctctgtcattcaggctgtagtgcagtggcacaatctcagctcactgcaacctccgcctctggggttcaagcaactctcatgcctcagcctcccgaatagctgggattacaggtgtgcaccaccatgccaggctaatttttgtatttttttgtagagatggggtttgccatgttgcccaggctgttctcagactcctggcctcaagtgacccacttgtctcagcctctcaaaatgctgggattatcagtgtaggccactgcacccgaccttggaggttatttgttattgaaccataactttgcctatcctgactctgcaagtggtttccagaaaagatcaattcttgaagaccatgaagccacaattagaccagagacttccacttgagtgaatcccgggaacaatctgaagcatagaaggtgttacaagcaggggtcaatcatgaagaaagatgtggcaggcaggagttaggtgagggtcaagtcaaaaaagccaaccattagaaaccatattccagttccagtaggaaatgcaaatgactcagtggatgggtcatgagaagaccagaacacagatgataggtgttaagatgaggagatgatccctcaatggtcatggagggatttgaattttctacagtagatttcaaaaaaatcagggaaacagcccaatatcctttcagataccattcttattgactagaggcctgggcttgcctaactttgcaatctgtaggtcatcactgtgaccagctagttagggcttgggcagatgggacttgaaacaaagagacggaaattggtagtagaatccatctgacactttgacttttttttttttctaatgggatattttcattaaccccatcctaaatttctatttcccggatcaaatgatagctggtcaaggaacatcgtgggttatattttctgaaagcgttagccatcttaattttttttgtgggaaaggtggaagggactcactcctaacttttcccaaactgtttgacaacaacatatttttatacggttatcataagtgttgattacatttgaaattggtcctttggactaaattgtctaaattttctagttcagtatgatttactgtatagtgtttcttcagcagatctaaaccttaaaaaaaactacttccatgtgacaaaccgtgatgcaattttgcagctgttttcattctaaacatattgagcccaatatatcccaattagaagaaatgtatatgaattatccttattaagcggtatttgtaattctctagcacttgtctaaatttctttggtctctattttcttctagttgtacattccaattggctacattaagatacagcagattttacaaaataatgaacaatttatacatgttttaaatagaaatgtttaaaaattactatggttttcatttccttgattcatgaaatgataatataacagaaagggaaaacaaaatccaaaatgagatttgggtcatatgttttgctctgaacacttgatttttctttggaacttggagtttgatataatgtggagcctggaaagggagcatatggtgtatacgaggcactcttttctcttactgtgatttttctctattttcaaaatgcaactttgggaaaagattttaggtggattctggccacctacctataaatggtagtgtcaatatctttcttggatcctgctgccatccaggtgggggtagaacctttttgaaaaattgtagaaaaggggtgaagtctcatgtgattatagttgtagaaatccagcaactcataccctctttgtggtaggcatataaatgctgtctctatcaatgtgcctggagagggttccttgaagtactagtggctccttccatcctgtacagttctttgatggggatgggatactctgaactcttggactgctctccctccctgggctccccagataatttagtttggaagtttcttagatacctagtacaaagtgctatctaagaaaggaattaagccaattctactggtatagaacattcatttattcagagattatcaaactgtaaaccacctgatgaaatgttcataggttttttcattgagtattttgtatgttttttacttcattactttcttctcttctctttattgtttcccccctataatttatttgagtttattttgccattctttttccaactctttgatatgaataattagcttattaattattaattttatgcttttctgcatttctggtataggtacttaattatatacattttcctttaaatattgatttagctgcatactgcaaattttctgtgttgttttcattattgttgaatacaaaatgtttaaacatttttaatatactctttttgtgatttatgaattattcaaagcaatgctattcaagcaaaatacaagataagccacaaattccagtcacatttgtgatttagaattgtaaacttcaaatcatgagatttgttggccctatggctgcctctggttgtgctcaatatgatgcctggatattgctacaccagattcttgcacacagccttttgcctggttcttattggctccatctcttttcccatgattctcctgatttctccaatactcttgccattaacttttgtggctgcagacagtctgatcttacttctgtcacatccttacctccactttgctactcagaactataaccttctgaaacttagccatcctcaaacatgtgcagactactttgtcagaatgtttagatcccttttctgttttacaagagaaaatatgtgtttataattatgtataaattaatttcaccaaacattaatttatttcatttcacattaaagtttatctgtaatattttaggctgttcataaaagcctcctgaatgtagttcgttagttcaatcttataaacctagcatttcattagtaggatacatttctgatgaataaatactgttggttttcaacatcaaacactttgcaacaaaagttggaaaagagtgtcctgcatttactcaagactactggatcttatttccaaccaggatatatttattctagttagtgttgatgtgacaatggggactggtgactcagaaaacttaatttacaaatatttataatttattttgcctaaaatgacattagggacagagaggtgaccatttggggagttagactggcatgagctaactaccagtttgtcccaggcagtcaaaaaatacggcttcaaggaaagcaatggtcaaaaataaaggttgaaaataaaaacattgtctagctttggtgcgatatccaaaaactacaataactattgtatttgaaaactttttaaatataccttaagctttctgccaccttacagaaaggacagtctcttggctggctgttatggctaaattttaaaaatatccatagggaatatcagtccttcaacctatagatataaaacccccaaattctgaaactgccaacagtctttttttttttttttccacagcatttacttgtgttttgattgcaagaagtacccaggaaggaataaaatttagtaacagaatgaggatgttatgatttttttttaaactgggttaggggtggggagagggagagagagagagagaaatattttgcactggaaaaactataatctggagagacagaggagttgagagtgcccctttaaactgcaggactgcaattgatctctgtatgttttctggttttcgtccctttgaaaggggaatgagagccaggatcattggctgtactgtggagctgtcacatctccatactgaaaaggtacactgcaagtgaatttaaaccgtttttggctttctattgcatattgccaagagctttgagactgatgaaccaagtaaatgctctatttagggctaagtgagatacagattcctccaatctgatagcgtttcagcctccggagtgaggaagcagcagaaacagaagcagcagaagcaacagcagtagcagcggcagcagcaacagcagcagcccctactgaagtccaatagaggagacttgatctctagttcattctggaactccgcctgggattgtgcactgtccagggtcctgaaacatgaaccaaactgccagcgtgtcccatcacatcaagtgtcaaccctcaaaaacaatcaaggtaggatctggtttttccctctgcttctgcacatgtgtcttcattcatctacctaacacatgggcattgatatatcggggtactgacagtggacatacctacttgatttgagtttgaattgaaggttgagtcacaataaagcatttggctctgcatgtgtgtgtagactggaaagaatagtttccactgaacacttctttcatcttcatgactttttttttttttactgagaatctatcagtggtatatttccagaagaaagttttgtgagtgtctagaagagtttccagtccatgccaattttcttgatagaactggggaagaatttgcaaactgctagaaataaatagcatcaaattgactacaaatctgataacaggatttcattgtcatatgaattttggatctcttatccttttttaaaaaaagctcatccttcattgtgagcattgaactggtggttatactaaagtgattatagtgagagaggatgaaagactagagagagagtataaaatcacatgtctttatttatatcaccatgtaactcaaaaccagtgagatgattggagacactcttcaatgcaggtgttgtttaaaatttgaggcttttctgacagcacatggttaaaggtaaagaacaaactcacaatttcactcttctgttttagtttcaagtcatgcttataccattctctttgtttttattcgggatgctcttatttccaagaaggcttataaacgaccagacttccaatcaaagtttactatattttgccatttacttgaattgtattattatctatgtggatattttgcatcttgagggaaagtgatggattcgtctgaaactcttttatgaaaaaaaaaaaaaactaaaacaaaaaacgtgatatcctgacagggcatctttagttactgcaatctctcattaacatacaagtgcataccttttgctactattcctgataagcctgactttttatgatttatattatgttttggtttatgtctcaggcctttaataatattgcatagactgtaattacaaaaggaatataattttcaacaatgtctcttcttcatgaatttacctaccgtttgccagagtgtttcagtgatagataaaccataaactaaacatgttcctctatttattagcagtgacttttaaaagcaatggggtttccagggtatattaaatgatgcataattagattcccatcatacataaacatagggagttaactgaaatcatgcagaactcatattcagataatttacaccacctctaataacagatatgagaatctttttcagcattagattttctgtgctgtatctaagtttagaaataaaaaatgttgagcttttggtatagttttcctctgtgtatcagtttcccacatacatcaattatctaagcatatcactgaacaaagccaaaatagtaaatacatgacactctacattgggatatataagctctagtgggaaatatgtattgaagcctaaagtgggatagagttacaaactggctgcctactgctaagtatgtctagaatgctataacaaaaccagtggctttctgtttaagagtctgaggtcacaggaatcaagcatttattttcccttttctttattgagtaagcataaatgactactactttcagagacttcaaatcacttcctttattagtgctctggcattgactgcccacaaacaaactgtggaacagaaaaaaaaaatgtttctagtgtagaggttttacatcatcttgctgatcttgcagatgctgttttttccttctaactgcagccattgagttgaaatgaaaagcatcataaaaattggacaacccaccacttaacaatgtattatattaatggcttaatgaaggaatcttgaatcaaagctctgggtaatttggttaattgtacaagttaaattcttttgtgcaccccattcccaatattgctctggggagcaaaaaaatgcttgtgatgttcataaaatatatatagtcgcaagcactgaactattaagggagtaattacttgagtattttccaatttgcaatagtgaaaagggatgagtggaaaatctctcttagttcaaattatgtgctcaattatgaaacatttatggctttttgaatttatactaaaaatggctatctatatttaggtaatgcattagcctatgaacaaaatgcaataacaatctaaagaaaaactctaagatgagagggttttgggaagctgtgggacattggagctcaaaatactctttgaactattagaattttagtttcaagcatggttgtttaaagttaattttattcctcactcttaaatttactatcaatttactatcagataattttaagtaaccctccctcatggaatctggttggcctgcaggtaatgataacccactttgaggatctggaaataaataacttgcatattgctccattttagaaattcaaaaacctctagagacttttctcccaaagctcagtgtaataacctctagagaacttttcccccatcagtatagtaaatgctgactgtttcttctctcaacagttaaactacggctaaaaagaatgcaatgggaatgaacaaaagtgaaatgcattgctaaaatagctgtaaaggccaaaagtgtgcaggaggaggaaaaacagctctgtgtgtgtgtgtgtgtgtgtgtgtgtgtgtgtgtgtgtnnnnnnnntctcctccacttgaagttcaagaagtgatgaagtctatagtgggtaaaattcagcaattgttgccagtgaaggctgtttgtggcccatgatgtgtcagagttggaaaagaggaaattgggagaagttataatggaacaagatgatcaagagtattcaggttgcttgacacttgctttggtcgttctggccattctttagctcagacagttactgacacacttttcctggcatactttggcaggtatgttcctatcgtcaaaaccagtaagggagagaaaagggagtcaaataggggtgccaagtgtgttctcagatcactttgggtgaaatgctgaatgcaattcactctgaaaactttcctccatttcagagcttgtaagggaagaaagcttttcctgatgtgattacaaatcttcctgtgaaggtagcaacattctttttaaaaaaatcttttactctgagatgtttaatggaaagttttaggaagtatctgggaatgctaaatagagatcagatctttgcgttattataaacgtgatttctgaagaatgtcccccaccatgggtagcaaacttgagtttttccttcaccgttatagcttctcttggctgcactgaaagtaaattaaacctttcagctaaatctctgatcttggtttacttcttttgctagtggaattgcaaacttagaattttgcctctaaaatgtgcagatttttttcttatttctttcacatttgaatatcagtctagtatccttgtgtgtctaaaatgagtagagaaaatccttcatcctttttgaagttataaattgtgagtaacttatctggggtggtgattcctggatcaagaattatatgtattatactttatatggtaactctgaaatacagtacacaatatttctttacccttcccatgtagtgaccggtcttcctctttctctttcctttttacaagacctgcctgatttattttaatactgccttcacacccaggttttcacttccatttagaaaagagtctcaaggtctaaaagttctagttacttcctacatagccctgctgcaagtttttacaaactatacttaaacgaatctttaagattttcattgtcttcggagtacatcttgagctggcaaactttttcatggtgatttttactgccttttatattgtaatattgatgagtcattgtgctaataaagacttttcccccttgctacttctaatccatagcctcagccaaatgaggcataggaaacagaagacaagggggtaaaagaggatgaaaatcttatcacaagtatgtattgttaaatacgtaggcttggaacatggtggttaggaaataatttcgttagcaaattggtattttggagtgtgacattgccatgaattggcatgatgagatggcttggaactacagcattgcaatctcactggttgttaaatttttttttttttttttttttgagacggagtctcagctcactgcaacctccgcctcccagtttcaagtgattctcctgcctcagcctcccgagtagctgggactacaggcacctgccaccacgcctggctaatttttgtatttttagtagagacggggtttcaccacattggccagcatggtctcgatctcttgacctcattatccacccctctcagcctcccaaagtgctgggattacaggcatgagccaccgcgcccggcccacttgttgttaattctatacccctaacctaaatgctggacactgacaaacctgcgtttcacatagtacttgaacttgaattgtaagttattcttaaagggtatttcataattaaatatataaattatatccacaaaaatttagaaatgcgaggaatgtttaataacaaaaaatctacctctgtgtgtcattgcaatatgcaaaatggaagattctccaatgtcattattacagtatatgaaattctaagtggaaagattgttacatacttctacattgtaccttatcttagagagtcttcctattcctaatcctaagaactttactcataagaatacataaaaagaaactttataaaattatcgactcaacatagattcatacacactaaagaaagagttaccactggtaactctacagcaactgatttcaccagtgagttctacacttccatttagcaaggtacagatttttcttcagcattaggatgagtcattctaagcggtgatagctaaggaaatcaaaagaaaaaacttacaaaaattagaaataaggatattgtatgtgtgtgagagaaaacttttttctcttagcaatggtctacatatttttaattactctgacacagcttccttatatgcttaaggcaaaatcacagcctgtgataaacaagaataggaccatctgctaatgacaaatttatcaccacttacaatttccatttatggccaagtatttaaatcttaaataattatagcacaatttatttcaaattactataaattcagctgtttttaaaatgaagcattatagttttttttctttttaataaagagtgactataataattggccagctttacattttatagcttagatcttcataaaatcaaaagtttctttttcctttgacatttatagtgtttgaatgtcaacttttactttgaagaagtattcttgtataatataatttcaaggtaaatttaaacagttttatgaagtatttagtatttattttattcttgagaaagtaatgtgttaatacttttctagaaattcatgttttggtcagttagtgaagacattcttgatggtaaatttgtgatgacaaattactaactctcactgaaaagacattatgggtctacaaatgaagcatggaggtagtaagctaagatagtggttatcaaagtgctgtccctagaccagcagtatcagcatctcctgtgaactcattaaaaatgcaaattcttggactctacttagacctactaagtcagaaactcttggggtagggcccagcaatctttggtgggtgattctgatccatattgatgttttggaaccactgagctaaagaattacaaaataagacacatctgtgctattgtcagcctgtaagaattgtctgagtaccacagaagaggtctaaacagcttcagaatgatacttagggttattaagtaacatgaattctgtgacagccaaaatctcatcattaggtttatctcttttattcctcacagggattacttgatactatgcctttcacccagtagacattaaatatatatttgttggttattaatgactgttaaggtcatttagtagagataatgctctaagaggacctaaatgatattgtaaggtgttactcaacatgtaagcaggttagaggccttgctttttgttttaaattcatagaaaatttctcaaagaagtatactgacattttggcttttgatggttttgttctctgatcttggtttggggccatctggtaatcaacacattttggtaactagggggatttagaatcatactaattttttgtccagaaattgtgctggagaaatgtctcccttcttgccagctgtatctgaaaattggcaaacaatggtagggaggaatatcatcacattagcctttctccttgcctttatgaatgttctttggcccgtagatatgtgccaggttggtagggcataactggaagtagcacacaactggaacaacatgaataattgtgaacaaagctggccttccacggacagacacagcataatattacattagcagaacaagatttaagctgggggataagctgtgaaataaggaaattacctccaaacaggcttatttcttggaaattcttcatagcactctgatgtttttctttttttttttttttatagttaccactgggaagaaaagtaaaatgcatacagcctgccctactacctgcaaacggatataaggcagatcggatggctttttctttagaggggcatccttaagtggagttctcactctccctttaccacatgaaccatgtggtcttgcggaaggcaattaaccctgttaaggatttctcccccactaacagaagggcaataaacttaaattatctgcccaaacaaaaatgctatgtaagtgctttgtattatgatttgttctagtagcaatttttaaggatacgacattttcataaggagttgtatagtgagaatcaatttttatgacataaaagctgagaattttatttgcaattattattaactataatgatgataaaaattcattttgaagtcacccgggggatgaaaattatcttctaatattgtagtaacatctgcaagatttcatcatgaacctttaccagggaggtaggggaagaagattggattcaaatgtcattgaaagaactgattaattcagtaaaaaaatgcagttagtcatcccagtgctgtgctaccaaaatggaaaatacctgggtagctgcattgatggtacatatggttgcattgaggaggaattgtatcatggaataaatataggcttcatatgatctctgtgcttctagacttgatacttcctttgcctcacataccttccccatcccccaaaccccaaaaatggttcttttagcaaactcctattcttactttaaatcttatgcagaattttctcagtgagaattttctcacaatctcctagtcagactgttatgttcttacctaatcgccgatgttctcatatagtcttctgtacctctttaataacaattaatcttttgagttataattatttgtttccatgtgagtctctctacgagctattaaagtgctctgatttttttttttacttttgttaatctcagtacctatcctaatatctgccacatagcaggagctcaattaatattgtttaaataaaagaacaaaaagaacaaagaaagctataaattcatttgccttcccaagaaatgtagtttgacttttgagttcagaaatatattggtctttgttgagctaagcagaactaaacctgttactttgaaatatgcaaacaacatttgaaggaaataacaaggttcctcagggattgtgagaacaatgtgctatttctcttgaggataagtggcttctgtaagtaaaaaaaaaaaaaaaggttttgcattatgagcgtttttctacattaaggaagtcctgtgaccaaacagagacaacccctgttgttcttctttggagcttgcattagtatagcagacacaggttactgctgatttcaataggtagggcttttcagggggactgtttgttctggcactctagtgaggctttttataatcagaaaccttaatttccaagatgaatcattgctgacggactgaaaaacaccacttctcccaactctggtttccagaattttgccctaagaaaaatgagttccacttcattttaatggaaagtaaatagcataaaattacttattgtatttaaagatcggccctttatttgatttttttttctgattcagtgaaagaattaggacagagagacaatgcaaggcaggcatttttgatcaaggatggacagctatggcaaattttttcctttaggtgtatcctctgaaggaaataaaatagaatgaaagaacaaactcagaacagttgttggatgaccagtgagcacagcatggtgtgaggaatagagcactggactcgttctctcattgttacagtcattcaatatttcatgaaagagaattcaaatgtttggagggtgatagcttttgtttttgaagagcatggctatgatataaattaatatgattacaatgtaaagtgatgagtattaagagggataaatacttaggtttgtcgttggtgggaagggaggcattcacaaaacccaagccagaactctacataggagttagattgataaagaaagggaaagaaaatagttcagaaacagagaaaatgtgcaaagatgaagaaaaaaggcaatgcaactgtcatgaaagtatttaatagttgagaccaactagattacagagggcaaatgattaggaggggtgagaaacaaggctgcaaatgcatacatggagctggactttgtgttgtttttcaggatttggctgtactctgacggcaaagcttaaatgcaatacagcagggacaagatcttgggatctaaattcaggacacagttctatgaccctgggaatcattcctgaggtttgtgtcttcgagtaaaatataaagatggtaacacgttcctggtctgtctttcaggataatccaaatataagatgttagtattagccagacaggttttacagaaggtaaatcttaacaagaacaaaaggtttgttcattagcttcatttagaaaggtaccagctactttcttgaaggttattaataacttattaatatacggtctttaaatactaatttagtggtagccttataatctaaaagtatcttttttgactaatgccaatcatttagctgtaccaaaattttcctctttaatatttgaaaataatatactgaccatcattctcttgcatatttattgctgattcattatttcaacaatgcctagtaatacatgaatggcttctgttaatagcattgtgtataatctcgaagaatacctggaaatttcaggtgtagagatgtgacaattattttcttcctcattctctgattacatatcctatatgttgtctttaataaagataccttgtgttttttgaaagatcagttccaagtggtcgggggtgatctctcttgatggctcacaccattttccagaagatacaggaaaaattaaagtgcatttgatgtgctgtgtttctataatcataaaactttaaatatttcttagagatttcctagtctagactctcattttgcagacaagaaagccaaggattagaaaggaaaaataggcaaacgtgagcattgtccattcgctcctttaaacaggaaccacacttatgatcatggtcttttgagatctggggtaagttaaagaacatgtaaattttattaattgagatgcttttcattgaaagcatcagaaaataacagaaaaatttaaataaattggctaaaagattaagaaattataatttcccaaactgaaaaagtcccttagtagaacacctccagggtcagttaaattgatgcccaaatatcatggcctagaacccagcctctttgtgtctttctgctttgtttttctcaaactaacttctgccatggtgattacatggtttcttcagttccataattggcctgcagacatgacaactgacaatgtccagtagacagagtggtttctttctttgagtttctttttaagaaaaagtaccccacaactcttgttggttagaactaaatcttgcaccaattccttatctaattgcttgatgatacacagggttgagtggagaaaatagaaaagtaggtgacaccagtaaatattggatcctgttgaaaaccatcagggagattggatggtttgaaggtagaaaaccaaaaatacataccacagagatcagcaaaatagattttagaatctgacagacatataagttgcaccacactgtgaaaaataggcaatgccatgatccaagcacattttcaacaaacgtgtattaatttaaaatataacattgtccccgattgcttcctttatagcagaggcttctttgatcacgtttgagcaaaagggcaggtagaaagaagtctcgtctcctttcatattaaatgactcagtttccaatcaattttcattgtgttttctttccttcatttcttttttctttgttaacatgtcattggactttcttctatttggggagcatgaaacaaaataatggtgatatccctcatcaaataattagggttctcagggtctatcacaattatgtcttctctgctacatctagggatttgaagttcttataccttcaggagcgttgttctcaaaccttcattgtaacacctgaatgccctcatggttaacaggagtaacatgaggattgtggttagatatgcaacagttgacactgtgatgactgggatgagcaagcactcacctaaagacataccagagcaaaacccattccccctccaaagaaataccttgatctttgacttttgtttgctatattcacaatcaaaaactgtatactaaatggcttcattttataaaagagccttttaaattgtgtgttctgatattttgtctatccatatgttaattcaacaaatgttagttggatatacaatagatattaagttgcacacatgaggagaccaaatgggatagcacacagagcctgtctttaaaaagcttacagtccgacatcttttctcttctctccttgcttgggatgaaggagaaaagcaaggaaaagtaagtcattgatgaccatagcgtatgaaaagtgtcatgacaatggcaagaaaaatgtgctctgagacagcatagaaggggctcctcaccccaactcgcagatgagtttggatctttgaactgaaacttgatgggcaagcaatagcagcttggtgaagaatcgggagagaaaagaatactccaaatggtgctatatgtgaaagtactcagataagggagggtaccaccactaccatccttgctgtcatcatcattattatttcatcactaccattgttaagtgcccaaaccatgatgcttttctaggtacttttatgagatatctctagttcctacagtgacttagtagtaattattgttcttattttatagatgaaaacattaacttgcccaatgtcacccagactgtaagaggtggagatcatacatgagttcagataagcttactacaaaactgagctgactgctcatgctttctgcctcctatttgagtgtctcctaactctcaggtttccgccagctctaaggaactagtttttgttacccaaggtcccctgctattttaagcctctcaattgaagtttcctgttttctctcatgagaatgcttcctgttccttattatctggctggtagttactgctcctcattcgggctgaattcacagggaatttgtctcatcttggaagatttctcaaccctttttttttccagcctcaggaagacgacttgctttgtccttccctccccctgcaaacaacatcacatttatgtctatgtatctttgttatcctatcccttcaccctctttcctaccctgtctaccttccactatatattgaatccaccgctagactgcaagctcctggaagccaaggcagcctctcatttgtcattgtgacttcagtgtctagcattattcttgacacggaatgaaggctcaaaaagaacttgctaaataaatgagtgagtgaaggccatccaatgtggggaatgctatgttactgctccagaatattctttcatagtattaatgtttcattttatttgatatataatcacatggcttttattccagaagacgatatcactatgagaaaggaagctaaatactttgttggttttttcaagggattttctttctattgtgtgtgtgtgtgtgtgtgtgtgtgtgtgtgtgtgtttgggggtggtggcatatgtatttaagacaataagttagaagagataagaggtgggttttaaaaacgtaaatacaggccaggtccaatggctcacgcctgtaatcccagcacttagggaggccaaggtggacgggttacctgatgtcaggagttccagacccacctggccaacatagtgaaaccctgtctctactaaaaatacaaaaattagccaggcgtggtgtctcacgcctgtagtcccagctacatgggaggctgaggcaggagaatcgcctgaacctgggatgcggaggtggcagtgagcagagatcatgccactgcacaccagcctgggtgacagttcaagactctgtctcaaaaaaaaaaaaaaatgtaaatacagctgtagttggcttattgctaacttatttcattggagtttggctgaaaaggtttaaagtgatttcaagtttggagaagttacttttttccataataagaagaaaatatcttctaggcacctactctgtgccagaaagtctcatacccacaaattcatttgttttttttttttttttaccattttcctgctcagtaaagtagtaaaaatcaacagctaaccagctgaccttcatctagccctctgtattcagtatttcttctaatatttccagataggcattattctcattttaccaaaaaattttaagggcttaattttttgaatgcaaaagaggtagaactgggcctactactcagtcgtgctttgactccttatgtcatggaggcaagcccgttgcatcacaccacatggcaatactgcttatgaaaatatctaacttaagggtacttccttctaaaatatacaggcacttgactatcccatcattatatgctgacaggtgggtcttttcaaagtctcacgttttcacggtcatcaccccgctcaagtccttatcatgtattactaatggagactgtaaggggaggcccacctggaaacatcagaactgggaactcagacctcagtgaggcaggagaaacaatagagaatccagaaagcgcatctaatgggaatactaagcaggacataacaccataaactaatttcaaaggatagcttagggtctgggagagatggactattgaggagtaaggacaagtttgcacaaatctggatgaccagtgattttaagtccatttggactagtgacttcttaacattagaggcccaggcagaggcatctgtagcaatcttggtctagccaggatcagggtaagaatattaacaatagcaaccatgtcagaaatatatatgggattcaagtatttgcaaaacattttagattttttttgtgttgaatgtcaaccacagtcctataagacacacatacttattatcaacaggatatgataacatgaagaaggaaatgtatgttgttgaataaaaatagcagtatataatgaagtatatatacactgtatagttttataaattgcaacacattttggaaaggcaactgcttaagagagtggttgtgattacacgtacaaaatatttcaggcatttaaagtactgggctgaatttttcccagtaattaaaatagggcataagaggcagcatatgttctagagatcactagagtacaataagccaagggcagatatgaagccagcataaagtggggaaatataggaacaaatatcctattacagtgtgtgtggtctattcctggacactgtggttatagagtccaagttctgctgccaatgccacaataagaaagccatggacaaatgtagaaaacagttaataaaagtgatgctatctatgcctgatctaactccatctagtgagaagtttcgagaaagagtttgagttgagtttgtggaatagattaagagtaagatcaaggaggatagacttggatatataaataaaaactgagttcattcttaatgttcaggagagaacagatcctgcgtctgttgtatcttacgcagactctgttggtcaatacaaataaactatatccatttggtttcacttgctctaacttgggatttctcaacctcagtgctattgacatgttgggccagaccactctttgctgtgggtctgtcactggcatcgtaggatgtctggcagcatccctggcctctaccagtcagtagccccttccccagctgtgacaatgaaaggcctccagacattgctagtgtcctctcgggagcagaattaaccactggcttacatggtagctgttgttgcaggtgaggaaactccgggactaggagtaggtctgggtcattctggtctcatggcttctgtgaattgggagccactgtagcagtctatttttgggcctttctgaaactgaggatggttgagccacccaaagaacactcagaggatgcagcatttgtcaatcaggatttacagatggaggaatctgggcggagagttagtagtctgcccccaaatcacatggaagaactgatatttatacccctgggataacattctataccctgtctcttttctctataacaagtgatttttattttatgctttgcaaagccccaacacttaggtattgagtgagaggcaaagcaggaaggacgctcctgcatttctgctcctatccctgctcctgtcttggccaaagtagcacagctatcaccattccatgctgaggatggttagtgttccttttaaaatagtaacaaataatgttctctgaattattcctctatgcctgcttggaacagaagacagaccagtgttaacccagaaagcaacacaacaatattccttatgtgctgtcggaactctcttttcaagggtaaggcaggctgaggctgcagggtaaatctgaaaatcaacaaggtagaaagatacagagactgactcaaaaagaccatttcatcatccattcctggtctctttccagaacagtcatcttcttgcctccatatttcagtcttccaggctatcctgtgctattctgccagagtttctttcctggcaaagccttaacaaatagtaccccgttcttgagaatctgaattctcatcctgatagcatcttgcttggcaatcttcaaattctatattaatctaggaacttctcactctaccctttttcataaaataggaaatcatctcagggtgggagaatcacaacttgaccactcatctctcccctatttgcctgtcatgaaatctaagattctgcattttgagactgatttttttttaaataaagaggttgactgctctagttattttcttaaaagcagatgaacttgaaaattttgacatatgtatattttgtcagccaaaggcataccatctatttcaggaggcaatattatatccttgctaacaatgtgcgctttggaatcgaactgcctcaattcatattccagcttgccgcttttagcaatattatctgaggcaagttttcaaaatcatctgaaccttcttttctcatctgttagataggataataatgttctctatgttacagttatagcaattaaatgacatgatacatgcaaagtatttttaaaaataataaataatagccatcttcattattattactactttttttgaaggagtcattgataaaagcaaatgcactattgaagagatcattaataaaagtcaatacaatgttgaaggtcatcttgtccagtttcacaatcatctctgagttattgggaaatgtgttataatgaatagatcaacaaaaatataactacagtaaggcaaaataatatgaaatgaattacaaagactaaatcactctgataagattgattgtcttctgactgatattttactatattcctaacatgggtctgagaaagaggagaataatataggcaaattgctacaatcatcaattaagtaaatttctaaaaatgttaaggaatgtataacacaaaacgagctaaagaattgtttgcagaatgagtgttgatgatattgggtttgtcatggttgccgttccctatatcatgctgttcttaccgttgctgtgaccttcttctcttgttcagcaggacattgacatgcagcatgtaacatgtactactagaagatgtaaccagtgatctggctcttatgccaggacagattttgttctagggtcctaaattggtactaccttcatcactgattatatcagtcagtggtccatgctattaatacaagcagcatgacaatcttaggggtaagaaacatgttacagtttagaaagatctgtacaaggtctacttacagagactggtgtcaaaaatttttatgagacttgggaaaatcatatatattttttcctttcctcttccctgggttttccttattccttaatacatgcaaagctgatggggtcagtttgggatctcgaagggaattatcccctctgtattacaagaggcctcatggtgagctatgctttgttcaaaaaggatgaaagcaatttaaattaaataacaatggataatcatctagtttattgtaaggtattgccacttgaatactacagttttactatggaatctttgtttcaatagttgttttttattttatatgtgacttactacaagaacttactctgttattttaatgtagctatgtttttattttttcttgagtagtagtaaagagggttatgtcctgttatcatggtgacttacccctgccatccattcctggggaacttgcttggctgctatggtccgtgtggtgacaggttattccttggtagacatgaagtgcagagggtacagtgacattaaagcccttttcattacctgaaatcttcttacaaaccatctaccaaggtatgttagaccaagaaaaatgtcttctattttcttctacagattataaccagcaatacgctgagatgataatggggctggatatgaaaataaatagagtactttactttctgaaaatcattccatagcaaccgaatgcatttgggatgatatctatctatctatctatctatctatctatctatctatctatctatctatctattctaagagcatatgtttgtgttcaaatgtctgcttttctaaaaaagtatttttggaaactgacatataaaatgatcagtactagtaatgctcaatcctttcttgtgttttggtatagtactgactttttataatctatagacattttgcatataatttcagattagctgatatagctagggtttaattacaattacttcctagagaaaaagctcctttgtctgaacggtgataattctgagtatatgatttagatgtgcctattataactgggtgattgaaaaaaactactgagtaaattcacaatttaaacaggatgacacaaggtgtacatttaacttatttatgacacaaattttttcaagcctccattttatggaaaatatagaatactgtgtgttacttttatttattcattataggactattttcttttgggtccttctttacctactgtaagctttgtagcttagtttgcgttactttctgtatataaactaataaagaggcatatttttcaatagacatgagcctttcactaattcagaatgcctatttctttcattaggacaaattagagattatgtttttctctgaacaaaatgcatttttatgtcaattaaatgagagtttttgatgaaatgtttcctaacagagagtaagtaattgtgatataattgtttgtagatgaaaaataactgccacattcatggcaaatgtgagtttaatgcagatgattttcatgactatgatgtgttttatgcggctttttatacccactgttttggaagcattcatagtaccagttaaggcaaaaccagcttaatgtttgttttagtgcttggcaacaaatacagtctataaaatatgtagtagttaatattaaaagcacatgccagattgtaacataaagagtttattcaatctctttaaagtcatcaatttgaagcttcatctgaatgagttagcatttgagttccatatgattttcagcaggtgagatcttgtgaagttaggaattggctacccctgcgagcccccattggcacagcccccagtttcttaatgagcttgcctcattgctgagtgagcaaaacactcttaacaatgttccttttgagccatctttgttgcagggggaaataaagagaggcgccaagcctgcaaattctttcctgatcccattggttcaccaggagagaacaattttgttttccatggttgcggtctttcaaggttgcctttacttaggatttgattacctgtctccctcaatcaattagcctctcccacacactctcttgcctccaataatgatcaacctccttttctaagaccagcctcctctttatcatattgcattaaacacttgatgaaagaagacctagaaggctttaagaaagacagggtaatattttgctggtgtagagggcctgctcttcggagacaaatacttgcttttcattttgatcagccgtctgcacttaaaagcctcctagccagggacatgttaattaaacagtctggggctcagtgctgccatccgtaaattggaggattagagaaataatatacacaagtacctggtacataccaaatatgatagaagatatcttcaacctttagctataagaagaatggaaaatgaaaaagagacaggtggagagagggagggagatgagagctgcgtggagctggtatgctggttaggaggtaggaaataatgaggcctcgaccatctaagatacagaagtctccctgctgaatcgaaaggaagtgctacaatattctttcaaattcatcgcagttgagagaaaactggagcagagtgtgatatcaagaaagggcttcaccaggatgatcaatgcaaatggatatggagctttcttggaatgaaacattatcccgtaacaccaggtaattttctttattaaaaaatacacattaaagtcttagaatagtttgatatttaccgacaagttgcgaagattttacagagccgtatataccaccctattgctaatattttacactactatagtacatttgtcacaatgaggaataaacgttgtggcacattactattaactaaactccatactttatttaactttattacttttcccctaacctcctgttccaggatcccctctaacacatgacatttagtcattatttctccttagccttctctgaactgtgacaatttttcagactttcttttcgacaaccttggcagttttgagaagtactggtccctgattttgtaggatgtgactcaagtcgattttgtctgatgtttttctcataattagactggggttatgggctttggggaggaaaacttcagaagggatatactattcaattcatatcctaacaagggtctatgctatcaacgtgacttatcactgatgctgttaacctagctcacttggctaagacagtgtttcaggtgtctccactataaaacgctcttccccctgcttcgcacaccatactctctggcagcaatagttggcaccgcctacccttacgtggtggggaattattctctatctccttgagacagggcaagtatcaacataaattatttaaaattcttctattcggatatctgtctcttcctcttctcccaccccctgttgactttattcaatcacatatttattcaatcacttagctcctgcatacttttagcctacacctatcatttttgttttgtaagcatttccttactttctgataccatcataagctccaggatgatcttgtatattccctgccttggccctagaatcagcaatttccccgaggactctggtttctttcattggagaatggtttttgaaaccaagatcttggtgctgggtgtgctggtcactacaggggattcatcgcttctaggccctctcagtggacagagctaggaaatctatatgtgcatactaacccatgtatgtatacatatctataattatttcaatagccatccatctgtgtccatattaaatatttaagcatgagttcacaatgatgtttcctactctagtactgtaccacatggatcattctagtcttcctcctttgcttgtctgtaacctcccatttgaaaactgagaaaattggatctaactcttattggttcatttacttactttttccatccaggtatacatacatgaagagtggcttcaggactggtaagttatgttcctttgaaaaatagctttaccaactagaggacagtgctcatgtgcagttcctttgcccttttatcttctactttccaataatttccaaagttacttaggtcaacagtctttaacccaccctcttcagtgaagttatgttatatacttagcatacagttacatctttttgtcgaagtgtgcatttcatcccaggatctcttaatctactagttattttaaatttgcctatgttaaatttattctctgctctgtaaagttctatgaattttgacaaatacacagtgtcatatattcatcactatggtactgtgtggaatactctcgccaccctaaaagaatctcctgtgcttcacctagtcaactgtctccctccccaaaccccttcaaatctctgatcagttttctgtccatgtatttctgccttttccagaatgtcgtgtgaataagatcatagattatgttgccttttcagataggctttttttcatttagtaatatgcatttaagattcatccacattgtagcatggattaatagctcattctactttattgctaagtaatattatctgtggatgtgtccgtttgtttatccattcaccttctggagaactcggttgctttcagttttgggtgattataaataaaacttctagaaacattcaggtgcaggtttttgtgtggacataaattcaagtcaattgggtaaatacctaaaattgcaacttatgggggatatggtaagtctaaactgtctttcgaagtggctataccattttgcattctgaccagcagtgtgcttcaccagcagtatggatattgtctttttatttttttaagatttcagtcattctaataggcacgtaatggtatcttcttgttttaatttgcagttctctaatgacaaataatgctgagtatctctttatatacttatttgctacctgtatatcttctttggtggggagtctgttcagttattttgcccatttttaactgggttatttattttcttattgttgatttgtaagaggttttctaaagaaatatttcagatacatatcgtttattagatatggttgttgaaaatattttctcctagtctgtggcttatcttttcattttcttaacagtgtccttcacagaacaaaggtttttaattttttattgtatttctatcctctttttgtccatggttatatcctctactatacagagctgttccacttactgttagagcaaatcgtattaatttctgttgccctaaataattgtccattggccgagagctgtggctcatgcctgtagtcccagctacttgtgagtctgaggcgggagaatcgcttgaacccaggaggcagagattgacgtgagccgagatcgtgccactgcactccaccctggatgacagagtgagactccatctcaaaaaaataataaataataaataaataattatccattatattgtattgaaaagagctgctatatatggcatgataccactcattatgttagttttccccgttctccataaaatgaccactgtgtctgtcagagttgtcacacagaagtctctaaccatcttaacacctgagcatgcccaggactggaggggaactattgcgttctgtatagagtacaacaatcatgggcgttggactcagagacctcggttcagattttgctcttaacatttcctggttgtgtgaacgtagaaaagtaacttaagttttctgaactttggccttctcacctataaaatgaagataatatcgtccacgtgtcttaggtgctattagaaggacacatacgaagtgtttagcacagggcctgacggagtgtagcactcagtaaatgttagtgcttacttgcttttcccccttgtgctccacattttctttcagcctcctgatttttcccagtggaactctttaccttgcatccatcatttctattgcaatgcatttctatgccttttcgaggagcttttctattccatctacactgaaaatggctcatcctattgatacaatttccctgctcccagccaatggctgctgcagcacttcctgatatctagatcacaaagtccctgaacaggttagggtagcacatgttaaaaaaacaatattcctgcaagttcacctttctcttacttctcatttccaacctaagatcttttcaatgagcttactctgattgaatataaaaacaatttttaaataattcaacctaaaataatagaagtattttttgcttttattatttgtaattaagttataataattgtacacatttatggagcacagtgtgatattctgatacatgtatgcaatgtgtaatgatcaaatcagagtaattagcgtctccatcacttcaaacatttgccatttctttgagttgggaacattcaaaatctgtttttctaggcatttgaaaacatacaagaaatgttgttaattatagtcacctacagtggtatagaatgttaaaatgtattcctttcatctagctgtgcgttgtgttgttaaccaacctttggctgtgcttccccccacccctacctgcctctggaatcactattccactctctacttctgtgagataaacttggaaagaaataatactattaggatgataatttcccacaaattcatctataaatttattgcaattctaattaaaaatcccatatgatttattatggacctgtcatactaaaacttgtttgggagagaatatgctggagaattgccaagaaatgtatcagaacattctataaagccacaataactaaggcaatctgatattgacaatgtgtattttatcaatggaaaataataacataaacatatatgtatttatgtggtttgttcatatatatgtattgtgtatgcatagttgtgtgtatatatagtatttatatgcatatatttaagcataacaattcaaatcatcatggaaagcatggaccatagcaaagggtctttattacacaatagttgtgagcactggccctggcaccagactgcttgctttgaatctcgactctgtttccgggatttgaatctgtcagagctatgtgaccttaggcaggttgtttaatttcttggagcatggcctcagctttcttttgtgctgaataagaaaataatagtacctaactccaaagtacttagaagggttaaatgaattaatgtaggtaaggagcatagaataggtgctggcactaagcaccagcgaatgtgaaccattcttattattatcatccataatatagaacgtaagcaattgtctgttcgctttgaaaagtaacccttggcagggcgcgatggctcatgcctgtaatcccagcactttgggaggctgaggtgggtgggtcgcttgaggtcaagagttcaagaccaacatggccaacatgatgaaactgcatctctactaaaaatatagaaaactattagctgggcatggtggcagatgcctatagtcccagctactccggaagcacaaaaattgcttgaacccggaaggcggaagtcacagtgagcaagatagagccactgcctcccagggcgagagaggaagactccatatccaaaaaaaaaaaaaaaaggaaacctttagtgactagtttagagccctacactgacaggtgcctatccagttgctgatttcttgtgatgtggatttatttttacttcataaaataaagaggcaaccttacactttgttattaaaatagtaagtggtaaggaaccctttaagggatatggttttaacatattattcaaaataggaattgcaaactcaattgcttagagaggtcagcaagtaaatcaatgtactagactgggtagagcgtgtggtgaaatgaaggccttctagacgcttaagaagacaaccagttttcaacaccacccaattattgccaggcagaaacatgcgtgcacattttttaagatttttattttcatgcaatattttctggcttctaaatgttgacaacaaatccaaagtttgaagcattgtgtggatcaaacaaaatagatgtctagagatcagagttggttcatattgtttgttgcaatctgagacttagaacctcctttaggttacactacccagtctttctcccaacctgtgtaccccaattgtaccttgcacagtgctgcccaggtgataaggaatcaatgcttgttttttgttgaattaacttgattttaattctgaatctttctgattccaatcaatgctttgaattaataatactagctcctggccaggcacggcggctcacgcttgtaatcccagcactttaggaggtttaggtgggtggatagcttgagcccagaatttgagaccagccttggcaacacagagagaccccatctctacaaaacaaaacaaaacaaaacaccacaaaaaaacattagccaggcatggtggtgaagtgctgtagtcccagctacttgagacgctgaggtgggagaatcacatgagcccgggaaggttgaggtagcagtgagctgtgattgcagccactgcacttcagttggtgccacagagtgatacaccatcttagtaataataataatggtaatagtaataaaagtgatagctccctctgttagccatttattttaaatatcaggtgctggtagggtctttacacatatccctctgatcattacaatactccgtaaaggttgcttttctcactttatagatgggaaaactaagaggttcagttacctttctaaggtccaaggctagtagaattagtgatatgacattgtctaggtctgcctttttgagggagtgagatgtcaaaagtagtagcaagaggtccagatccctctagggtgtagtgtttcctggcatcagctaactgggaatactgatcacgtcttgtcctggaaacacatttcattggatgaccttgtcaggcttacaatgcaaaaaaaaaaaaaaaaaaaaaaaattacaggataaaagatgaaagatgtcttccacttacaaatggcaagcgatagctatccaaaggttcatttgtaaatcagttgtttgaaactcggaattcattttcctgcagaaacagttacaaatggtggttatgtttcccctgaggctcatccacaaaagaccatttagccttaatgtatctgaaatagtgtacatttgctgtgaaaatgtgtagaaaatagaactcttgtaattctagtaattaaataaaagaaaaagtaaaattgaatgagaactttaaactgcatcttgaatgctgcttcgaaagaaaagcagatttacccagaagaggatgcagaactttgaaaataattttgtggggattttaaagggggcttctgaatactttcacagcacttgagaagttaatgaaatcatatcattgaaatatcgcatttcatttcgtgatttctagatttttaacataatctttccatgattaatgctatttctagtgttctctttagaacaagaagaagaagggaaaaaagggtggaaaaggaaaagacaaatgaaaatgggcttcctaatgatgcagaagttgacagagatagcatgtgaaagaaaattaaagatcatgtttgtttttcgataggcatgcaagaagcaaaattagccatgaattatgaacagtggaaggaggaaaacatagattctgatttcacttgagagagacaaaacaatgctggtggcagagatcttttctctgagaaattccagaaactgttactgttttattccatcatcttagggcatcatacttcatggcaaatgtaggatgggtacaggattgagatcaagagtgcaaaagttgctcaaatggactaaatgttgagaatactaagtacttattaaacaagagaggatttgttctcaaacaaaagtaattatcattttttattgtctaggttttatcactcatcttgtttaaccttcagccaggagaatgaaagacagaagtttttaaaaaatatatatatattgtgggcggggtgtggtggctcatgcctgtaatcccagcattttgggaggtggaggcaggcagataaccatacaggagtttcagaccaggttggccaacatggcaaaaccccgtgtctactaaaaatacaaaaattagctgggagtggtggtgcatgcctgtaatcctagctagtcaggaggctgaggcaggagaatgccttgaacccaggaggccaaggttgcagtgagctgagattgcaccactgcactccagcctgggtgacagagtgagactccatctcaaaaaaaacaaaaataccaaatatatgtatattgaatggccaaatggttgaacaggaaattgaggaagaatgaacaacctcccagacacttccacagtgagtttgcaaggagcctaaaagctagctgcacagagcagaggcccttcctgccaaatgtaaccttctttagaaatagagaagagaaagacagttgggggacaggggttattatggatataggacaaaaacaaaccagggtaaagaaaccaaaaaccaacaaggccaaaccaatggacaccttgaggtgatgtgggcagacacagagtgtttccctttgttgttctttggagagtaagataggcttccaccacggaccctcttgtcaataaatcttcctgggttaagtggttagttagactaaattgctcttccaccaatttgagctgacagcagcacagaaccgtcaaaaccattgctgtgttgtctccatagccaaagagtgttgttgatttatttctgttagaggaaaattttaacttgcctacctttattttttttaatcatttgaatttaagacactagttcccagtaggattcactatgacaattttcagtgatgagaaaaagcatcaagggtttctggtctctgaagaattgtgttctttttggccaataaaattaaaatgaaatagatttaaattgtattaattcctaatttaaagctgaagtttcaagtcaccttccattactattgtataggatttctacataaacctattgggacctgagacaggctaagccttactaaatttcctggctacagggatatttcttttggggattggagatgagaaggggtaatatcgacaatctcattttctccttaatttttccttgattgaactggtgtccatttgcttaacttattcactgtgtgttatagaaatttacaagttactttgcaagtgtagctatattcatgtatgtgctatcttttctttcttcaattaaattgtgagctcttttaagtaaggaattatattttatcttctcccacaatgaccaaagccagagtatcttacttaagacacttgaaagtggaatacaaaaagtattttcatgcagtccatactgccttgtttgctaattgctgtacacatgcagacatcatctcaccaactatgccctaagcacctcattggtggagtcttgttttgaggtagtggttgtaacagtttgggtcttttattagtgcattgtagggacagagtagcctctcaacaaatagttgtttgttaaatagtcaagtttggagggcagtagatgagacaaagtagaaaatgagagcttttgcattaaactatgacaactaaaatctatatttaaagtttacaacctaactgtatgttctttttagtacataccacatcattaaaacttgataaataatgtttcctcaatactgttacttaataagtaataaaaatatgatgctggcaataaaagctgttatattgttactgccttacctcctggttggtgagcaaatgctagaaagaaaaaatgggaaatagtttaaatttgagagttttggatcattttcttggcaaagtcaagagaccatttgcttcttttaagcagtctaaaaggtgtcaaaggattagaagcaaaggaaatatcagcattgctgtgctgttagacagattcctagagaatcaaatagggatggtaacaagattgagcaacccatctccttagaattttgcttccctttacaccgacaacctccctattttatttttaattacccatagaaataaacaggaatgctaaaatatgttttgaagataaattctataatcatttcaagtttgattgttgataaatatgatatggatgaatataaagagtagattttcaatatgaaaaaagagtctcctaaaatgacgtgggttgtaaattggagatgaatttctcattagttttagtgccttttgtgtctcctattgtcaacttaaatggtctcacacaacacatctgttgctaggctcatgagatggagcagagttcaacaggtacatttcaaggccaggaaggctgataaactgaaggttcagtaggtaagagaagcactagaaacataatgatcagtgaaatttagtactatcaagaggctagaaatccggttagaaaacaaaccacaggattggtaggatctgaaagttgtcacagcttcaacagtcagtattgccaaagaaaataaaatggggcactttttaaaagcagtaaacttcgatttcactcaggaataactattgcaatgtgggagagacctcagcataacagctcagtccaacgaaaggcaggagactgtttaaatgctggggtgtacccaaagaaaggcattaagggagagattggtccatgtgattaggctatctgggtttgctaactagtgttcacctagaggagcaaacttctcatatctttttgacagaaattagtggtgcaagttggagcaaggcatccactgaagttaggtccttactgtcctacagggactgggaatgagaactattgccttgaatgtttgtatttcaaggagatggctctcatgtccttgaggagccacttctggatggtaaaagatttatttcaatgggggcagagaaaggatttataattgcaagctttctaaaataagtgctttaagagggattcaagggcctattggcctatcaccaggttttggctggaacaaacagtaaattctcctggcagcattgagctttctcagaaagtcattttaaggggggttagtgcgagaaagactgaaaaagaagtagtcccagaactgttctcaccttcgatgcaggctgcgtctcagcctaatatttgtcctgatattattatctcaggggactcacagtcaggaagagttggtaaagaggttgtcagactttaatctcccccaacttctagtaacttaccagaagatgccacaaagtttagtggtgatggagacccctctagctagaagaaacttttggtatttgtttttattctatttgtgatgtgttctagcattgtgaaatgaggcaaaaagaaatgctgaagctggttcacagaagtaagttggtgtaaaatcctatgtggtccaggtttatctcaacaatacaatctcctcatgccgttctaccttagccaatctcctcccatcaccatagcaaccacatcttataatatgtgattccaacttagagtgcctcatcactgccctttgtacatgcagattgggaaagatggaagagactgttcttgggaatagcacacagcaatctgggccaaatctgggtggtgtgtgccccactatttgccaagcttattatcattttttttctcctttggccttattcaactagaagtcctctgcatctactagaattcactacatatatagccccaatcttctttcttttatctctggcagtgaacaatagaaggcatttaagagcatgaaaaaataaataataagtgcagtatgaggtgtatggtagccattgctattaaaattactcattcacttttctatgatgaatgaaactctagtgataaataataatggtgcccctgaaaaaattaggtttgcaattaggacaatttctgccttgtagacaaactgcctaatattatgcttcaagacagttatttaccatagttataacccaatgtgtcctgctgaaatggcttgtttttcctacaatgttaaagatttaattttttgaagatcagtttgtttgaaacagcagctgtacttttaggaacataacctgaagaaatgtagatgtagatgtaggttaaagtgagttcatcacaggcaatcgaagatgtagtttaaagatgtagaattgttgatagtagtaaaaattgtgaacagtcccagatattgaaccttagaggactcatgaagttacataaggtaaacacgtgcaatagatacaatgtaacctttaaattgatggtaactgtataatatttttgaaatggaaagatttttatgatacatttttagtgaaagaagtagcttgcaagtaatgtaaacactgacatttagttattaaaagatacatatacatatttgtatatatttatacttacatacatacatacatacatacacacacttatatacatttggctaaacaaaagcttaaaagaatgatttgtaattttgtgaatgcttttgttatttttcgttgttgtttttctgagatagagtctctctctgtcgcccaggctggagtgcagtggcacaatctcggctcactgcaacctccgcctcccaggttcaagctattctcccgcctcagcctcccgagtagctgggattacaggcgtgcaccaccaggcccggctaatattttatatcttcagtagagatagtttgcaccatgttagacagtctggtctcaaactccttacctagtgatccacccgccttggcctcccaaagtgctgggactgtaggcatgagccattgcgcccagccgcttttgctatttgataattattttcctaataaaatcctatactaatggtgtaacaaccaaaataaaaaagaatgaggaacgtaaaattgcagtttgcttttcttattcattatgtcaacaaaaccttagccaaccacactggcccttcttctttttcctggccaagtcaaccctattcctatgaatgataactggagaaaatgtgcccagtgtggggaacaaggatatgttggtgtatacctaccatggtatctttctcaggggactgagtaaatacagggctctgtgcaacacaggaagaattcttaaggggcacctcaaattccaaaattcagatcctttaaagagagagggaaaatcagtactgccctctgacttggagtgagaatataccctgctgtgaagggaagaaggtcatcctaaggtgggaaaaactaaaggtaagtactgtacatatgtctgggacacaactttgaccttgggggagaaacacacccattactgagtagctttgtcctccacttataaggcattggatagatgttcaaaatggggagctgtacctatgaaacttttgaaagtcatggtaggggctatattccagaagggctgcaaaccctaagagatgggtcatctgcattctgagccttgacagtgaactgaaagagtggtcaccctctgaggaacctggaggccttgccatgcatggcgcaggggcttctgtgcatcagctatttgttcttgaagcaatctggtcagcttgaagaatctgaatatcatagagggagaaaggcttctatagagcattaaagcttgtgacctgaattcccaatgtatgcatttgttggtttatcctgaagaagagaacttaaataagatcatccgcacggcacagtttacacacaagcatgttatttttctgttttctctgttgcactcccagatttttaaaaaacacttaccatgatatccttcaggactcacctttcctggcacagaggtttttataataaatagtaatggaatgaatgagtgagggtgctatataatatttaccgatatcctacttttatatatcaggcctcatattatggtgcagggcagcacaatttatacccagttgttattgccatttatattcaaaagtatcaagctttgtcattttgcaaaaatgcttttcagtcttggaatttttatttatttagactggttttctctctctctctgcccctctctctctgtctctgttcttctcttttctcccaggtctaatgtatcagaatcacctgggatgattgttaaaaatgcagaattcagggatccagtgcccagtcataatctctagggctgggatctgaatattaacattttttaaagactgcagctcattctcatggacactaaattttgagaaccatttgtagttaatctatttaaagaatcacagttttatacatcgtccgtctgaaaatgcaaggtatcacctagaaacttttaagacaacttttcctctcctaggaactgtaaaataacaaagtagacaagtggagagtaagggtgatagaggtgggtggatcaataggaactctctttcctgtgagggtaacttgatagtgactaggcggtgcagttggagtgaattgattttgttcaaacaagttttcctgtttctcagagttcacagtgaacattttttttgcaggcttcttgcagtgtgctgtttcacaaaccatcagaggcatttagaagggccagggtttttcttctaaggcttaagaactttaaatctcttgggtggaagtagttttcagtgacttgtttgttcttgtgatataagacatagtaccactaaccccttgaatctatcattcctacttattgctttaaagccaggatagtatcaagttcttgatgtactttactaatcatggctttcattttctaatgtgtatttaatggatatctattcatttatcattcttaagtacagaacactaaagaaagcatactgtaatcagagatgttatcaggctcaattattttagattaactgggtattgttatgacaatactctgtgatatccctatcttcaagtacaaagtaggcaaggaaaaaaatgcacatcaaataaaaagtagttggcaaaactaccttttgatccattttctctctattagaaatatgaatggctctcaaatgttttacaaagattgtacattggacaccaatgaagctgttcaacactaaggcccaaaaaagaaacaaaaaaatatggtggctctttttgagaaacaatgaatttcatgtctttctagtaaaacacactataaaatagttcttcttgtgtttacatttatataatcattgaatcatatgccacagtcctggaaagttcaaacaggaaatagtgcgtgtgtgtgagtggggagctactctgtgggactggtgatggcttggtggatattatttttcttttttaatcaaagtttagcaatcatacagaaatatgtaggcaattaccaaactcagtgaaatgtacacagatacccatgcctgtatagtcagcacccagctaaagaaacagaacatgaaaagcaccccagaaaactatccttatgctccctttcaggaactaattcttaaaaccattgtcttgacttctgacatcatagattagtttgcccttaagttctttataaaaattgattctttttttttttgagtcagagtttcactctgttgcccaggctggagtgcagtggcatgatttcggctcactgcaccctctgcctccccagcttcaagcaattctactgcttcagcttcccaagtagctgggattataggtgcgcaccaccacactggctaatttttgtatttttagtagaggcatggtttcaccatgttggacaggcaggtcttgaactcctgacctcaaatgatccaaggccaaggactcccaaagtgctgggattacaggtgtgagccactgcacccagccaaaaatggattcttatatgcactcttttgtgactggcttctttgcaacatgtttgtgagatccatacgtacttttgggtgtacttgtggtttgtttattcccattgcagtatattattgaattttatgaaatactacatatatatttatacacacacatatatacacatatatgtatatatgaaatactgcatatatatttatgcacacatatacacatacatacacatatacatacgtatatacacatttatgtgtgtgtatatatgtatatatatatatgtatattggaggccttggccttggatcatttgaggtcaggagttcaagacctgcctggccaacatggtgaaaccatgcctctactaaaaatacaaaaattagccagtgtggtggtgcgcacctgtaatcccagatactcgggaggctgaggcagtagagtatgtgtgtgtgtatatatatatatacatatatacacatacatatatgtacataaacatgtatgggtatatttatacatacatatgtatatatgtatatgcacatatacatacatatgtgtgtatatatgtatgtacataaatatatgcatgtataaatatatgtatatatgtacatatatgtgtatatatgtacatatgtgtatatatgtacatatatgtgtatatatgtacatatgtgtatatatgtacatatatgtgtgtatatgtacatatgtgtatatatgtacatatatgtgtgtatatgtatatatgtgtatatatgtacatatatgtgtatatatgtatgtatttctattgatgatagatcattgagtaacatctaaatttaggcagctaaaaatactgctgctactcaattcatttcatacagctaatattaccctgaaaacaaaaccacacagacagtataaaaaagctacggataaatacttcttatgacctaaattttcaacaatatgttagcaaattgaataaaaatgtataagaagaattatacagtgtgatcaagtgagatttattccaggtatgaaaagctggcttaacattcaaaaatcaatgcaattcctcttatcaacagggtagggtaggaaaaaatagaagattatatcagtttacctagaaaaataatttaacagaatctgatatttatttactgcaaacatgcaccacaagttaagaatagagagaaatttccttaacttgacaaaaagcatctacaaaaaacctaaaattaacatcttagatgatgaaagactcattattttcctcctaaggtttgtaataaagcaagaatgtattctcaccattcttattggatgcagcattggaagttctagccattgctacaaggaaaaaataaataaggaaggaaggaaggaatgaaggatgaaaggagaaggcatacaaattgtaaagaaaattatctccatttacaaatttcataattacatagaaaatctggagagatctacaaaaaaacttacataacaagtggatgagttcaaaaaatcataggatgcaagatcagcatgcaaaattttattttttataccaactgtgaacatacaacaatcaaaatttgaaataccatgcaagctaaaatttttccaaagaaattgcaatctatttgtgtatacttaataaagcatgtacagaatctgtatgctgaaaatgacaaaatgctgatgaaagaaatcaaataaaatgtaaatgatagaaatatattcttaatttcttaataaattaagcatgtacagaatctgtatgctgaaaatgacaaaatgctgatgaaagaaatcaaataaaatgtaaatgatagaaatatattccatgttcatggattgagaagctcaaaatagggaagatgtcaattattcccaagtttctgttttgttttgtttttacacatagacaagcttattctcaaatttacatagaaaggcataaatcttgaattagctaaaaccatcttgaaaaagaaaaatgaaatatgaggaatcattctacctgttttaaggcttactgtataactacaaaaataaaattattgtggtattgatagagagatacatagatcaatgaaaaaatgaaaaaaaaaaacagaactattcaaatatgccaaactgattgttgataaaggtgcaaatgtagttcaatgtagaaaagatagccttttcaacaaatggttttgcagagatatagaccaatggatcagaacagagccctcagaaataatgccgcatatctacaactatctgatctttgacacacctgacaaaaacaagcaatggggaaaggattccctatttaataaatggtgctgggaaaactggctagccatatatagaaagctgaaactgaaccccttccttacaccttatacaaaagttaattcaagatggttaaagacttaaatgttagacccaaaaccatcaaaaccctagaagaaaacctaggcaataccattcaggacataggcatgggcaaggacttcatgtctaaaacaccaaaagcaatggcaacaaaagccaaaattgacaaatgggatctaattaaactaaagagcttatgcacagcaaaagaaaccaccatcagagtgaacaggcaacctacagaatgggagaaaatttttgcaacctactcatctgacaaagggctaatatccagaatctacaatgaactcaaacaaatttacaagaaaaaaacaactccatcaaaaagtgggcgaaggatatgaacagacatttctcaagacatttatgcagccaaaacacaaatgaaagaatgctcatcgtcactggccatcagagaaatgcaaatcaaaaccacaatgagataccatctcacaccagttagaatggcgatcattaaaaagtcaggaaacaacaggtgctggagaggatgtggagaaataggaacacttttacactgttggtgggactgtaaactagttcaacccttgtggaagtcagtgtggtgattcctcagggatctagaactagaaataccatttgacccagccatcccgttactgggtatatacccaaaggattataaatcatgctactataaagacacatgcacacgtatgtttattgtggtagtattcacaatagcaaagacttggaaccgacccaaatgtccaacaatgatagactggattaagaaaatgtgacacacatacaccatggaatactatgcagccataaaaaaaggatgagttcatgtcctttgtaggaacatggatgaagctggaaaccatcattctcagcaaactatcgcaaggacaaaaaaccaaacaccacatgttctcactcataggtgggaattgagcaaagagaacacatggacacaggaaggggaacatcacacaccggggactgttgtggggtggggggaggggggagggatagcattgggagatatacctaatgttaaatgacgagttaatgggtgcagcacaccaacatggcacatgtatacatacgtaacaaaccttcacgttgtgcacatgtaccctagaacttaaagtataataataataataaaaagtacaccccccaaaaaacaaaaaaaacaaaaagttttgcagcaagtggacatctatagacaaaaaaggagcctctacttaaacttcttactgtttataaaaatcaacttaaaatgaataatgaacttacatataaaacatataaagcagttaggggaaaaaaaaacaggagaaaatcttcaagatttaccatgagacaaatggtttttagatttgacaccgaaagcatgatccaaaaaaggaacaaatgagaaatgtactacatcaaactaaaaaaaaagtagtagaagtatttgcaaactacgtattcaatgaaggactagtgtctagtatatacatagagctctctaacctcaaaggaaaaagaaaacttcaaatgaacagaagacataaagaaatatttcacccaggactatatacagataacaaataaataaatgaaaaaatctttaacatcattagctattagttaaatgcaaattaaaaccacaataaaatatcatgatacccctatcacaaagcctaaaataaaaatagagacaacaccaaatgctaacaagaatgttgagaaatggaatcattcatagattgataatcaaaatgttaagaggtacagccaccatataactagcaattgtactctttggcatttatcccagagaaatcaaaactcatgttcacacaaaaacctgtacacaatagctttacttaaataattgtggtataaacttatcatggaatactattcaacaatggaaagagatggacaagcaacaacttagatgagtcttcagagaattattctgagtgaaataagccaacccaaaaggttactgtattagtccgttttcacactgctataaagatactacctgagactgggtaatttatttaaaagaaggaggtccaattgattctcagttctgtatagctgagagacccctggaaacttataatcaggcagaaggcaaaggggaagcaagcatgttcttcacaaggagagagagagagagagaagaaggagaagagaggagaagggagaaggaggagaaggaagagaaagagaagaaggagaagagaggaggagaggagagagagagagaggagagaaagaaagagagagagagagaaagagaaagacaacctaggggaaactgccacttttaaaccaccagatctcatgagaactctagcatgagaacagcatggcatgatccagtcacctcccaccaggtcccttcctcaatatgtggagattacaatttgggatgatatttgggtgaggacacagaaccaaaccatattagttacagactgtataattccattaatataacatttaaaaaatgccaatgttttagaaatggagaacacattagagcttgctaggggttagctgtgggggacagagaaagtgaatgtggtgatagaagccttttattatatggaattgattgaatctatttttgcctatttattaaaacatcataaagatagaatgttttgagctatatgccttgtaaattccatcttaagtggaaataacaattatgagaatcaaacgtatcagttatctattgctaagtaaccaccttaaatcttggttgcttaaaacagacatcgtttattactttccgtaagcaaaagtcagtcgggtggttctgatctggaccaaagtcagcagattttggctgggttcatttacatctgcagtcatatttaaacagaggtagactgaagataaaagtatgtcaagaaaagaacacaaaacagccaacagtaattttagtcagattttcttttatggaaaagtcttgtttattgctatttcttttcttgttgacaagcttcagatagagactcttcagctttattttgtcagagattgcttattagccaatgcgtatcttgtactttatatgattactgataaatgtcttgttgagttgtatttgaagtcctggaaaaataaacctcttgctcagtcacctggatccacaataacttcagtcaccaagttcactccttgagtaagcaaagtctccacaacatctgcatatttgtggccacacaagattgattattttaatttagtctgacaacttagcaagtgtaaacaagttaatgaaacaaattattgtgcctatgggtcagttaaacaatgtttggactcgtttttccattttctcaagtagctgtttagtaaacgtgacccaggagttgaataaatgaggtaaatgatatcttaacagaattggttgaatattttgttgtcaccagagccagtcaaaaccccaaaataattaactggaaattagtaagaccctctgacagggccagtatcagtttacttttttttttctcaatattcttcagaatactgaacttggcaacggggtggaagatcaaggagaggtgagtttgtttctgtgaaaaagaagaaaacacagtgtacatctgttccactaggttttcttcctctaccatgtagacagtttgaaaatgttcaatggccatagcattcagcttccctgttaaaacaagtaccataaagtattcatgaataacaaaataatcgtattcttttttttttaatgtaagagaacaagatgctaaccaggaaccacatcgatcctgaaagcgctttttggacaaatcacaagcctgtgattaactacaaagagcttatagaaagccagaactttcaaaataaaaataaaaatgttgacaaagattatcaaagaatactgtgcaatatatatatttttgtcattaaaaaaggagtgctcacgctagctgatccttgaatttcattagaagccaggatggctgcctgtggaatgcagtcctttttctggggcttacaaactggaggacctcgctcaggccttgttaaccagcacatgctgtatattaaataagattcacatttttaaaaatcttgatttctacttcttctgaaaaatctgaatatctgcttctgtgcagtcaacaggcctgcatttgtgtatcgtagaatcatctggagctgagcggtggcactgtcattttgtcatactccccatcagtccctttgaacactggggacaactttactcatttacatgagcttccaagtcactgtagacttttgagtccgagccctttgtgtcactctgagactggaccttatttcttttgaccaaggcagataccactgagggtaatagtgtttgtggaactcaagggagtgactccaactttggagccgctgaactccaataatggcatgcagaggctgtgagcctgttcaatacctaagccaggttcatgtcctggatcgaacttgaggtatctccgacaactctgaatctcctgggatccactctagacttgcgagacttgcaattagatttaagagcacgttgcctttagaatcatggagctcaaagaatcagaatgtaagtggaaactgaggttgagagagcttgaggactttcctgaccttcttgacattaccgagttctgaatggggaattcatttaattaggtgagaagttttgtacctcattaatcagttcttactattattttaatttttgaggtcttaataacagcaagtaaaaacatactttgttttatctgccacgagttagcccacagtaacccagtactgtgctacccaatgtgttaactatgttgttttgtggttttttaatgtaatgttttgtattcattcactgtcctatgattgtatgtatgtcagggccaaggtctagcagcagtggcttcatctaggagtttgctagaaatacagcctctctcatcccacaccagaactcttcaacaggaatctcgaacaatatccctgggtgattcatatagtgttcattagactttgaaagacattgacatatatacaatcatataatacttaaatgaatatatagcataatataaaaggactacaaaataacatagttaacaattcaaatgtcttcaggtatagaggtttttgcagctacttccatgcttcagcacagaatggtatggtatttttctgtttatttcattgggctgcttctaagattttttttttttttgaagaacgggtttcaaaggttaaaaaatacaaaacaagttaaaaacaacctgttattttactagcacaaactgaggagagaaactagaggaataaggttgaattagctagacaaagctctgtggagtgggttggtaaatttgaatggcctttgttgatattgagaggcacaagctggccatgaggtctaattggaattataacttgaatcctaaagagcttgcattgttgtcgttgtcaaaagacaaaattacaacaaacttagttatagttctttcttactcacagttcatgaatcaggacagctgccgttctacaaaatagaatgagagctcccactgggcactggcagagcggtgggttttgtaaggtggggacaaagaaatgaagcaacagtaaaaagctgactggttaatgttaagttaatttttaaatgaaggttaaatcagagaggatccacttattacactgactcagggagcctgaaatctcctattttcaggaaaaactgtttttttttttttttgcggggaggggatctatctgcttccttaatgtttcagtttgattatgtgtcattcagcatgagtcactccattttggtttgcactagtgttgtgcactagtgttgcactagtgttgtggcctaatgtaggaactcagtccaaagcaatagcctctcatgatctttgattaacaggtctttattgtgtctcttctggcgtgtctgggctcctctcttcttcagctatctcctcccctatctcctcctccttttcttttcccttgccttattcttctgtgttgtcctgccttgcattactaaactctcaatcctacgtgcctgaccaaagagctgatcatgttaacccacaattatctgaacttccaccaagggaaagcatatataccctaggattagagatgggaaacgtgcctgagatgaaaatatttaagtaaggaagaagggttggggctagggttctcctactttgttccgcactacccacacacatgtagttaaagttaaaaaggttgcttgtactctctgatacaatttgggagaacattgaacttactggaagattcgttagtgccacattcagtcaccaggttaggcatagaaggaacagggccttaatattaatacattgattatttcctatgttaagaaattctggaaattcaacgctgtagtactgccatcctgtgtagatcagactgactaggccgggatttccaaaagtatacttttatgagtgcgtgtgatgttgatacagcatggtattgtacactgcatttcaatttcttttcatatcatttggggacatccatatgggtcttgttgaaaaaaaaattacatttccttgtggccaaattacaagaaaaataaaatacaaagttttaggtaagatattaaatagatattaaatattgagtttatataaaacatccaaataattttttaataatattttaataagcttcattttatgagaatactgttttgtataaggttttcttgcttgaacagctacaagtaatttttgaagaaggcaatttaatggtgatcccttttaattctttattatcacaaatagcattggatataaggagtgtgtatattactgttttcttcatttgactgcttctttcttgctagcaaccagaatttagtttctataaattataggtcaaaggacttgtagttctgtaactctcatgattttgatttgttttttttcttttcagtgaaactataatgttgaaaatatttgtgataatgcatgcatatggatttatcagttttttatattgttttccaaaaataatgatgatgcttttcttcaattatagtcagatattgttcttctagtgttaaaaattttctttcagaattcaaataaaatgctggtttaacataaccaatcaaccatttcaatctccctttttaaagttgagtttttctgaatccataaatttggtcattaaatattaacataattttacatgttgcaatttacattttgcataattcacattcttgcaaatttcagctaagttcattccagtgctaaaaaaatgagaagtcgatttttgaaagcaaagttgaaaagtactttggatctagtgatagtgttgtgctttcataactagcctcttgaactccagctaatactgttgtaaataccttatagaaaatttttgttccatatcttgcccttgcacacatttaaagttcaaatatttcctgtacggatagttgcttttgacaaggtaccagtgtagtatgtgacaatttgtttaatacctttgcatgcaaataaataataagtttggaagaaaaaggaagtatcagggcccacaaatagacatttgagagaatcctcatgttgctctttagtcctgtcagcttctgtggtggattcttcatttgtgttataaatctggtgacttcaattttaatacactcttcctaattgtggtgggaaaataaatgtcaagtaaaaattaaatctgtttaagcataaagttctcaacagaaatgacaatctttacaaatttagcaaattaattttctgattattagactattaagtttcagttaattgaacaattaaaaatgtttaacctttataaaatgtgattttaaattttaaaggcctacagtgtctttaataaatcaatttaaatgaattaggctcaattatttttatgagaaataaaaatttgctgaaacaaacaataatcagtataaaattccctcaaacccactctggctaattttaaatatcagaagctgataaaaacataagtaaatccagaggttttagtctagaaaattaacaacacccgttatcttctaaatatcaatatctaaaaagaaaaatgagaaacagcaacagcaatcggaagtgatttctagatgagtaatcacaaagataagcacgttaaagggaaagaacaggaaataacttacatgcactaacaaacagaaaacgtttattgaaaagtaaatcacagagcagtggaggtgattgaacaggtagatgctgtgttttattccaataaagtcttcatctgctgaagtaataattgtcaaattcagaaagttacatacaaatagtgttcgaatgtaatttcaactatttaaattttggaataattgcaaaaatggctttaaattttatcacctcacacatttgacagctatcaatatgtcagggcccacctgtgcctcatttgttgcccctggctgagttactctggcctagtggggaagcaacgggacaggggtgtgggacttcctgggtttgaagctaggctccatggcttatttgttaggtgatctcaagtaagttactttgtgcctcagtttctttatctgtaacgtgatgataatagcctactacacttttggctggcatgaggattaagtgaggacacatatttcatccctgaacaatgtctaatgtagagtatgttctcaactagggtggctcattttgatccctactaccactagtaatagtaatccatgaaaatagggcctgtggtcaaatgataaatgttgaattagggcaaaagtaagcagctgttctaattacagaattatagtacttaatatccttctaatatgcattgtgaatctctgagcggtggcagagccatagtgtatagtgttttctaaatttacatagccgtacgataattattttggcccaaggatctcatgtggacactgctgtgcagaagacattttggaaaacaccagcctcgtggcatccccagactaaatgagcctctgcaacatccttttaataagaaggtcctttccaaagtccagtcccagccctggcccagatcctcctatttggaagcataggcttatgctctgtgtcaaggctgatttatcagatggtaaagcttgatagaactataataaacactcttcttgatcatgctaagtaattttaaatcatctaacactttaaatcagcctcagatttttcttgcttctttgaagacctctgccagagagaacatttggagcactggctccctcagacaccctttgggttgcatgtgaatatttccatcgtatttgaatctgttttcaaaataaagcctgattagaaactactttaaatgtctgaccagagtccaaacaccctcagaagtctttgtgaaatgtcatccatgcccggatcccttatgtatttataatattcctgctgtatctttttcccctgcactgttatgttttagatattcatccccttcttctctccaggaaggagtgtgcaactaatattaaacacagagacagccttcctgagcagctgccaacagatgcacagcccttggcgcaagttcagctgtcaaacagccctggcccatgaaacaaagggcagaagcttcccaaccacatgcggatgagcagaaacagctgcatttgctgtagccaggggcccagcatccaattcctgtgattcttaataaaaaaataccaagcacatggaaagggaaaattaaatactattctgacaaataccataattgctaacatcatctcccaggaaggcagcatggcagataacccctattcatgagcctttgtcccattgcgacaatcagtgctcaacacactgcattttagctttttactcagtcaatggcctggcaagagaattgtctttttttccctggagcttgaaaatggagtatatgaatttgggagcatatgaagttggtaggactagctcctggaggtaaaagtacctcagattatacataacaagtgattatatttcaatcagcaacatctaccgtaaaatacataagcctaggggcacttaagaaagcatataaacctgggtttgaatatggtggtagcactcagctgtgtccttcagcaagtttgttaacccatcagagagttagttctctcaactgtgaactgggctgatgtgaagattgaaagaaataatacctgtaaaacccttaacaaatgtctgaatacagtgaaagctcaataggtgttatttttattatatatctatttgctggtccaataatttttataagaccagtatgacttctccaccagagactgaccaggaaagaatgccttctgaatgacctctcttgcagcaatagcacggtaggacctatgttttcctcgaagggttaatttctcattctctggctatgtctagcactaacagttccattagagaatctcttgccctcatgatcttgttctgcatctggtaagctccccacatttgttcccctcttcacatgtcttttgcaaaatgagctttctattggtggttggctctgccccacactttcttgcctttataactctgtgtaggcattttccattctacttcctacttccatcagctatagaaggcccaacacccatttcagctctactccactctagcacagtaattgtagcaggggttttcctaatttccttgagggaagaaggagagagaaagcagaggcaggtaaagggcccttgagagggctccctcacgagctccacacctgtaatcaatgccagaagactcaatgcacattcagaggccaccggtgtagactggaggcagccgagaaagactttgtggaggaggcaagatttgaagaattgatagaacttggcttatggagaagcaaagggggagaagagggagaaggtgaggagaaacaattcctgagtattagaaaaaggtctgaatttggagctttaagatctaggtttgtgatcttgggcaaggtacctaaaaactctgaattttagttaatccatgatgtatatatgggggcggggggtaatgtgaactcagaaaacttgtgtgagaaggtgcttaaaaattagttgaatttgattttatagaagagacactagtagacgtatttagttgtaagatttttattgtgatattaatgctgccacgctaatagggtttaaagatgtagttgaatcctgttataaaacaagcatcatgtcagatccataattagcatttaagtattcattgagtgcccattatgccctggcaagctcatacctcaaaattgtgttcttttacttacatatgatttatactagggtgttttatgactttcaaagaaatttgccttatcaaggaaaccaattatacctgatggactcctgcatactcatgtttttcaatttaaaattatctttgattctactgatgatcagaaaatttgtgaaaattttagaaagtccaaacttttaaagtttggaaaatacaatgaagaaataaaaaatcagaatgaactgtttcctactcaaattttcattcataacataatctttggaatattattaatggatttatattattccaaagtgtgggtatcttgtaatttatgaatatctcatctgttccaagcttttgctattgtaattaaacttgcaatggatatcctttgtataaaaatcagtctataattacttcctttctttgcatctccatgaagggaggagaatgtttcttcctcatttataggctcaacagcccaacttgaccctccagtttgtcacacacatcttttctgcaggataagaaatatcagtttccttgcacactagcagaagtggttcatttccactggaaacttaccagaggcattctccaccagatactgcatttccttaggaaaagttttacctattttgctgagaagattttactcactgaagcataaaaatacatgctctcaagatgaatacatgtcaggtaagttctagaaggattaattttcagttatttaattctggaatttaattagatcaccttggaaggcaaatttaaagaacattcttagacaaggtattcataattcgaaaaggattttcctaagaactgataagcatggtggtgtctttccctttagtgctttttcctgggggcatttagaattcatggaaaacagttgtcaaacctcaaaaaatggactaatgaatgaatataagctcaaaaaatggactaatgaatgaatataagcttttactcaagaattaggaaggattaacatccttttgctcattctgtgaccagatgtcttgtatagggttatatatatttcatttctgtttctctggttaagggcatcagttgaaagtgtttgttacagctgaattgacttgtgcattcatactctaaatattattttaaaatatctaattaatatattattcaccgagcgactcttttttagtagaagctatcacatcagaaactctttattctgacaaagtgacatattgtataattttattcccaaagctaatttttttattttaagacatttcatgagatgttaaaagcccctagtgaagactgttaaatgagccattaaggttaggttatcaatgatcaactaaccaaactatcttaattttcttttgattgaataatagtaacagcaacggtaggaacacacatatgtgcaactaaaaaataaataaaagtaaggacaaactaaaaaataagaattatgcaatgggcattatttaactttgaaaatgtcctataagatttcaagggaaaaagtaaataaaatgtatatgcacgtgcttacattttctggaaacttctgggagcaactattttgcatttcaatatatttttatttaatataaaactaaaaagttgtcttaaatagaagttaaaagcagtttgctttccatacgcaattcattatatcaaattggatagtgttcttggctcagtcagcagcagcagcagcaacattgagtgcccttgggtgtggctctgtattagggtacagctagtaaaattgtcatttgagatagagaaatagtgtcatctcttaagaaatatgctattttcatttaacaaatgtttgttgggcatctataagctgtccagatgccatgctaagcactggggacacaggtatgagcagcatatacatgatcctggctttccagcccttaggttctagtggacactaagacaagcacacaggtactatgagaaatagtagaaagctcctgtgctccaggaaattagaactgaaaacagtttgtagtgccaagtagacaggtggaaaatatgtgtttaataaggaattagcataaaatatagagatacactcagtgtgcattcctatacattcaaatacaggaatgcacagtggcagcaaagtgtggtggtgagcagatgaactctgggcacaaattgcccagtttcaatcccggctccactattcctataaggtaagtggagcaagttaccttttgctctggaagccaggacagggatggtgggcagagagagaaagggccagagagcgggaagtgaggactgctggagtataattaaagcaaagcaggtatagtggttccaagaagaaaaatttctttcaagaagaaaaatccagaagaatggcttgtgcagcaggtggcgtcacacagcatgtaagagagggacttactttaatgctggtaggaaccggtaagaggacatagaaacccagaaagataagggtacttgctcgaatctctcaaccaacaagttcagaaatctcatgtaggacgtggtgaggtttatcaaaatggggcatgggatgcaatgaagtagcagagacactcaataatttcgacttggaagactggaggattcattaccataaaaaaactgaacatgggaaatgaattataataaaaatataatgactgggtgtttagtttgaataaagaatagaacatcactgtgtaataatcgctgagaggtttacaggtcaaatggaagattgttctgcaagagaaaagaaaggtaaacactgcaagcaactacaggccatgaacgatggtaaaatcgatgtgggagacagagcactgaactgggagtcaggatacctggcctctactgaatttttagcaaataacagacttttcctgcaccctagtttcctcatctgtaggcattacataaacaaatattttcatttatgtttctgtgagctcaagaacattgcctggtatttcatattattaagtgcttaattttctattttagtgaaagtatgctgcaagaatttagagacagtggcaggtaaataaagacagcaataaggcaaaaaaaaaaaaaaaaaaaacccagcaaattgtcaataaaaacagtagttaaaagctgatttctggaggcagactgcctgagttcagatcctggctctctgcagtgtgatcttgggcaagttactcaacttcttctgcctcattttcctcatttataaaatgggaataataatattatcttcctcatagtatttgtggaaagattaaacaagttaatatctataaagctgcttagagcagagccttttacatagggagtgtgcaaaattgctattaagcttcactgaggagatgaaactcacttgagctggatattaaagagagaaaggtttggagagatatttcaggccagggaagcagcatgtgaaaaggaagaagcaagcatgagtttgacagttgtgcatggaagataatcgtgtcactttctaggggagaaagaaaccaggatgaataatggagagcatttatttctagtacagaggttcctgctacaaggattaggaaatccggtcatacctacattgtgcctatctctgtagagaggacaatgggacaatactggaggttttcaaaagggagtgacataccatggctttggagtagctgggtctgataggcacattctgattgagtatacattactgaggtcatttggccagggttttctgcaagagtaaggcaaaagataatgaatatttttagaaaatagtagtttcaacatactccaaaaggtttggtattagtgatagaatgggccagggtttaagccatgaaagaaaagccttctctttgggccttttcatctaaattacaggtggtattggggtccctggagagagttcattttgtagtgaaatgctatgttttgtgtggagaagttttctatcagcgcttttgtgaaatttggaggtctttaaaaaaatctgtctaagtaaatggtaactaggtaatttgggagaggaacaagtatagtaatctcactgaaaaagttacagttttatttgctaaggattatagaaatagtaaaaaaaatgtgaacgttttcatgggctattacatgtatgtctttgttataaaattttattgcttaaaagatgtcctcatccacagccatgtcacctgagcctgtgcagtgctagtatttgagcagatgctgagttttcattttgcttcaaagtccattaattcagaactctttaagagtgcctttaaaagttcaaccacatttaactcatcttatctacctttgcatttcccatcccagttgactaaagttttttatactataagtgatcacatgttaagtaagatctgtaaatactgctttagctctgggaaattgtttgaaagcactttaaaacatggagtctttctccattattgtatttctttctgtatttattgcctatcatcttaaaaaaatctgaaaactgaagctatgacaaaataatgaatttgaacatatcacaagttgataactaagataaagaatgttcttttataagacattgcaaagggaggttttatcctctgtaagtatgccaaaagaatctacttggtctcaggtgttgccattggatgtcaacagtgataggccatttaaagataaggccataaactgatatctagagaacttttgattaattagcagctggaggataaatgcaaagaagcttcttgagtgtctagatagactaaagtttgctggatgaggtagatagagacatccttctggtggtttctctattgtctgagaagcaaatgctaactgaatatatagatagacattacacacacacagaaatttttaccttctctcttttcacaaccttgctattgccctttggcaatttcttcttcctttatattggacaagactgatcctgatatcatttgtattagtcagtgtccagtcaggaaaatataaaccatatcagatattttaacagaggaaagttattagaggaaattggccaaacaagtactgaaggactagatttgagattttacagagctagttatgaaggaagcagctaccacttctaaagtggtggtggggtgggagtggggcagggagagaagatgtttggggttcttaggatgaagaaacctggaaaaggtgcctgtgaaactgaagtccagacctttggatggaggggctctgtttagctggtagcactatatcagaagctcagagaagggacactacagaattggggcctacacctctaatgagagtgttgcttatactattttggggatgctgcaacaaaataccttagactgggtatcttgtaaataaggaaattatttcttacagttctgaaggctgagaagtccaagatacaggtgtcagcagattcagtgtctggtgaagatctgactcctggtttgtagatgactgttttcttgtgtcctcataaggtagaagtgcaagaagtctctctcgggcctcttttatgagggcactaatcccattcataagggctccatcctcatgatctaatcacctcccaaaggccccacctcctgatatcttcaccttggagggttttgaacatatgaaacttaaactctggattttggagagacacaaatatttagaccatagcagggtactttgccaccacttcaactatctatgaggggtcacaatgaggctggtttgggaacactcaatgagacgcaggaaatggaaccaactgctattgccaggatgaaaggccattgttgaggtgacacctgcaggaatgtgagcaaaactggaagaaacaagtcctttgtttctcctccagcctctaataggttaattacagcacaagaattttaactaagcgttactgttatcaaagcatgctgatagaaggaccttggagaccctctcaccatacacagacatatatatatataatatgtatatatgtgtgtatatatacatatatatgcatacacatacatatatacatacacatatacatatacatgtacatgtacatgtgtacatgtacgtatacatgcacacgtgtatacatgtaggtatacacgtgtatacatgtaggtgtacacgtgtatacatgtgtacgtgtatacatgtgtatgcatgtgtacatatacgtgtgtatgcatgtacgtgcgtatacatgtgtatgcatgtacgtgtgtatacatgtacatgtatacgtgtatacatgtacatgtatacgtgtatacatgtacatgtatacgtgtatacatgtacatatacatacacatgtacatatacatacacatgtacatatacatatacatacacatacatatacatatacacatacatatgcatctatatatatatgcatatatatagatgcatctattttatagatgcatctaagaatagggtcagtggtgaaccataaactagaatgatgagtatgattcaggaaaaaaaaccaaaaactaacatcactcttgttcccattatgggtctataattttattaagttattcagagatagcatctcagttaataattctcatttaataatcccaacagccttgttagagaagtgggataatttccatatcgaaaatgaaaacaatcagactcagaggatttaagtaatttcagtcagtcagtaagtagcggataggattctggccaaggtctgtttaacaacaaaggacatgtttgaactctcatccccttcaatggaaaataaggcaaagccaagaagccaaaagtacaggcacccaacaaagtgggaggcacagaacaagggggagggcaggtatgaacatccagagcgactttgattctagggagatgctcactcgtctacggaaggtgtattgtattcagtttctgtacttccggtcttcactctagccttgccttctggattgttctaccaagtactttggcttttctcatagtctttcaaaaattgttaatattattttgattgaccagtcataattgtacacatttaaggggtacaatatgatactgtgatatatgtatacaatatgaaattattaaatcaagctaattaacatatccatcactccaactacctatcattttttatggtaggacatttgaaatttactctcattttgaaatgtgcaacacattgctgactatagtcaccctaatgggcaatagatctcaaaacttattcttctgcctgtcctatttgaaacttggtaccctttgaacaacagctccctacttcctccctccccctcccctgccaggctttggtaaccatcattctattctctacttctgtaagtttaatgttttaagattccacatataactgagatctcaaacaaactcaaatcagtatgtcaaaggaatatcttctgtcttagtctgttttctgctgctacaacagaataccacaaactacgtaatttatagagaaaagagatgtatttggctcacagttctgcaggctgggaagtccaaggtatgatgcccatatcgggttggcctggggaggttgttcttgttgcattgtcctttggtggaaagcaactgagcatgtgagacagggaggaaattgggccaaactaattattttattaggagcctatttctgtgataactaatcccatgataatgacattagtccattcaggagggtagagccctagtgacccaatcatcacctaaaggtcctacctctcaacattgttaagattacagttaaatttcaacataagtttcagaggagacactgaagacacagcatctgcattcccatgtccatgtagctattcacaatagtcaagacatggaaccaaccttaagtgtccatcaatggatgaatggataaagaaaatgtgttatacatatgcaatggaatactattccgctttaaagaataagaaaatctattatctagcacaacatttatagatctggaggacaacatgctgaatgagataagccaggaacagaaagacaaatcccatagtcctgaagtcaaatttttgctgccacaaactgacgcgtccatggtggcagctatccctgatctctcatgctattcatgggtatgatacaacagtggccaacttcattctcatgcttttcacttcttgcctcccaccttgggggttttcaatgactgcttagatatgagacaccagggcacatgctcactcctcatgcatgtgtaatccagaaagggcagggagttaacaccctttggagtgaactttgagcaagggctgttagaatgtgtagatgcatttttctcccttcctctccctggatgaactcttcacatttataataacgtcagttggcctctttgaagatgtcctgcaaggctaggcaaacagcttcgctaagctggacaactctatagtacactccattatatttgtttccccttacactccttttccttcacttctgctgttttgggactgcgccatctcccaataaaatgttagcacaagatgcttttgcaaaggcttttttttttttctgggttaagagcagggactgggctgtgaaggagagccataggctaagatgataggacccacaattttcttagtgtctggtagtaatcccaggtatccatcagttcaggaaggtaggtagaaactataagtagattaaaacagggtagcaagaaggacttctgaaaaagtagtgagaatagatctgacagcttccacctttatggaatgaaagcttcatcctgtagattggttcttgtgatgcttatttaaaataaatttccttaaatgaggcccaacatgaaccaattctccacccctgtgaaaattttctattgccagtttgaacttctatgggtgatcatacaatcgcatagcttctgaggagctaactttcactcagaacttaggattcatctgttgtcacctcctctggggagaactcactggcccctctcctttctgccagctgttgagaatattagggttccctcttctgtgtttcagaggtattttctcatttctatcgtggcacattttatgctgtttctgcacaatgcagagagatcctgaaagcagagaatatgccttagccactgctgaatttctagaaactaacagaagcctgccacacagtagccatttaacatggattgattccattgactaaattaaagaattcatgaggagctctgatcatggcctgaggtttgcagttaccctattgaacaaatcccagaagagaatttgcggaattaggtctacatgtaatacacatttacccacatgatgaaataagatgacaagagctttgtggtatcaaaatatctatgtctctgacaattttcacaactttacttaattatattagggttaagtattggaaagccttgatacaatgctaatttggaagcattataccaaagtgttagatcagattagccccagttctcttctaaatagttccagaaaccagatttggacccagtcacgtaacggcagtaaaaaccaagacctgtctatcatgctacactgctttcttcagatgacaggggccttaagagcaaagtaagatattgattggcctccaggatccaggaaaaacaaaacaaaacaaaacaaaaaagccagaaagaatacaaggtgaaggcaagactgaaaggaaaatagttttgatgtactaggaaacaaaatcattgaatctgaaacactgttgtctttggaatatcctgagagaaaggagcccaacacaggtcatttggctggaaggaagatcaaggcaggagtccgtctggtgcgtggggttctccatgggagactgtcaacagctaagggcagcggagggcaatgatgaatgcctcagagccgagggccacagaaaaggcactgggaacactttccatgcacttcatacctatgactgagaggatggcctaggcaacctgctttagggtggaaactatagttacaaagatgagcagtcacttaatttactaatgaatgaccccaggtctcatagcttttctttaggaaggattatatagtagttaaaaagtgcatggttcccagatatagaaaaatctgggtattcaccttggctgtaccatttactgtgtgaacatctcaggctactatctttacctccatttgtctcagctggcacctccttaaagcaaaaataataatattacttcagagggttattgtggacattagagaaatatatgtgaaacacctgtccaagtagcaatggtgagtgtgcaatgaatactagttgtttatcatgtgattattagtctaattcttgcaaaatgtcccagcctttgtgttttgatgaacaagaatatatttttaaaaaattaaaaaattttgttgtcctcataatatagacatctgctccctgggacctaaaaagcaatccataattttccaaagctgctaaaaaatctgccatgttctaaatgacctttatcaagcgatctcctagtctagagaggcggaggagtaacttgaaggtgaaataccccgttagcaatcccccaggtgaatagaaaatttaaaataatattctaatgattcattgtacattactacgccccattaggtgtctacattacatcttggggcacaatcaatatctgtcatcctgcttatggttttggtgctagagcggttcaatttcattttgcaactctcatgctcatgaagctgtatctcgggtgtcatatgataaaatattactcagaagtacgtattcagtcctaaagcatagtgggaaataattgatgaagaaagtgtctttccatctggtcaaacaccattaaagtgaggatacgatttatatgagaaaaaacgaagattgatattccttttttttttttttttttttgagacagagtctcaatccatcccctaggctggagtgtagtggtgcaatcttggctcactgcaacctctgcctcctgggttcaagtggttctcctgctttagcctcccgagtagctgggattacaggcacgcaccaccacgctcagctaatttttgtatttattttatttattttatttttttagtagagacggggtttatcatattggccaggctggtcttgaactcctgaccttatgatctgcctgccttggcctcccaaagtgctgggataacaggcgtgagccactgcacccagccaaaagactgatattttatgaaactttttggtaaatccacgtgagagagaaagtttttattctgtactcaacatagttccattacaagcatttttcaaacatttaaactggattgctacttacaaaattttaatatagacaagactagttcatgaacatatcccctttataaatacaggtaccagtacgtagacatatatttcttgtatttaaaatttaaaaaatcatactacattttagaatatggcaaagcttaagagattccaaaacagtcatggataagtaataagtcacttgtcattgttctatacaaaattaatgaatgagttaagtaacctatgttttgagctgtttcctttcagaattgaaatgccaaaggagtgaccctctttttctcatgtgggtgcacacaagcatactccaatcgaaatatcttccccacacattctaccatgtggtagtacctagtaagtactaacctactcactaggttagtagagacttgtattagaattcagacatccttgggagggttaaacccacgatcaagtgactcatactttcacatgaatttttgaaaactttaaatgtatgatttctatgcaaattgagatcagactaagtgtgaattctacttaaaagagaggatttcggagtactgtggaataggacatgccaaggcccttgccacagcttgagacagacagaagatgacataaaagtgcgtgtgtgtctgtgcaagtgtgcgtgtgcatatgtgtgaagtataaagggcccatggagggctatagagatagatggataagagttgaaaaatggatttaacttggactgctcttctgttcaagatgcttttggctgctgcaccctttgcaatggctctggaaaatcaccaatagcatggggcttcatgcacagatgctctaagtgctactcgacttacccaactttataaaaggagggatgtgcacagctagtacatctgtgatatttgctttgggatcagaaatactaagtgggacagtggttttctttgatatagggagatgttcaccttaaaaatgactggaaaagtggcttgatttggtcttcaatatctaatcatgaaatggatatactttataaccagggtatatagtttgggagttttgactgattataatttatgtcatttcttttaaaaggttgagagattcaaatgccttgatactgatatatcaatgacacgttggagatgcattttttgggttttagcatactgaagtgaaagtcagtcaatagaatatacattgattccagggtaaatgtcccaaatttgagaaaagaggttatcctgaaaggggagaaattatctcacggtcccaaacaatatgttgtttcattacactgtttgtgggacaagaagggaagggggttggatgcaggattaagacaagtgaaactgtcacatagaaacatgaactctggttgggacaatctcaaaatgctgcaggtgtttgtaaagcttgctgagattgactgggctctcctattacttacttttgatgctggattttgtctgacttttgtcccataaaaaataagacactagaaaggctttttggtttttataattattcatcagtttctattttcacatagctttggagcactgtagaggatcccttggtatattttagaatgcctatgtgggggaaagaatcacaagtagtaaagagcttaccttgatttttggaatagatatgttttaaccaagtgtagtaaagtgaatattctactttctagtcatttgttacagaatcaggcactactacctccctactgtcacagtaagtagctgtagtctttctataacttaggactggtgtggggtgatttttgatgggtaaattttcaacattcttatttcagtcctgaattttagaattttgttgacatacacaggattcttcaatagccttctatttagtcttctatttgccacttcttatttccaactcatcttatatgttactatgagacaaatgttcattaaacattacttttgtttgtttttgagcaattgcttcttgaagtgccagttttctattgctcttgtgtataatccacttttctctttctggatttgaaggtcatcctcagttttgctccacttgatctcatgttaacttcctgcccctccttatcatgaaaagtactccagcctgcaactaagcccttctcctcaccctctatcgttgtctctatgcctgccttatgctattgcttttcccaagagtacccaccccaccctcttcttcctcctttttataccttactgagctttaagtttcaccttaatttctacctgtataataacaaagtagcttgcattcattgagactccacaataggccagccactattctcaacacatgtcatgtatatgttgttaaatgttgatatcaccctattggggaagattcttcctctaccctctaagggtctctggcagtacctaagaattaaattaaactgaggtggctgggcgtggtggctcatgcctgtaatcccagtgctttgggaggctgaggcaggcagatcacaaggtcagaagttcgagaccagactggccaatatggcaaaaccccatttctactaaaaatataaaaattagccgggcatggtggcgggtgcctatagtcccagctactcgggaggctgactcaggagaatcgcttgaaccggggaggcagaggttgcagtgagccaacatcgcgccactgcactccagcctgggcaacagagtgagactctgtctcaaaaaaaaaaaaaaaaaaaaaaaaaaagaaggaaactgaggtaacacagatcaacaggagaatatcatacacaatttgctaaaattttacatatatgtggaagtccttacaaaacaaaataaaaaaatatagacccaaagaagtgaccaaaacagatagcttatataccttttagacaaagaaaggataaatttttaaagaaatgataagacaaagggatttgggctaggagcaataaattgtagggaagtaactaacagatatattggggaaaactagtagaagataaaggttattttagcaagcttgtttgaacagattcatttcagcattgattcccagtctctggtgattagagtgttcctcttttcttggtacagggagagcacctttctcaaatgaaatttatgtgtttttttttttaatggcccatttttaggtagcaaaggggaggtcagagaccccttcctgcatctgctgttcctcaagtatctccaactcaaaataatcaatatgcccaaatagcatattttgaggtggcatgtcctgaactccttcaaactgtataaggtagttctacatctccattttacaaataatggcatcaaggcacaaaggaataaactcactaagggacacagttgtgaagtcactccgctgggacacaaagccagctgcctgccccacaccctgttctctctgccactctgctgcccttcccttcagtcttctcggactctccagctcattctgctttcctctatctatgaacttatatggtagctgttttcaaaaccgtacagtttatcatttcattgtgacgagttcatgcatgttagttttttctgagcaattacatagcaagatatcttgaaatgatttctatgcctcattctactttctttccaaagcagtcctggctcctggtaagaactcattaaatactttgtgattgatagataatacaaataatagagataggaggcaggggaattctgggcagaagaaggcaggtccccggcaagggccccaacctcaagcctgaaaccacagcccaaagtgagaacatacatacctgttttcccactcaaatgttgccttttccaaaaccacccatggcctgtcccactcccaatcctgtgcccataaaaaccccagaactcagccagcagagaggagaagcagctggatgtggaagactatggttagatgtcagagagaagtgacttgacttcagagggacagcttgatggcatagctttggagaggaatccggccgttcctcctccatcccctttccagctccccttcctgctgagagccactttcatcggtaataaaatcccctgcacttaccatctccaatttgttcctgtgaccttattcctcctggatgccagacaagaatttaggtgccatgagtgcgggtacaaaaggctgtcacactgaccttccactgagcttttaacacttaagccatccagccatccacagatggcaaagttgaaagggcactgtaacactccttctagggcttcaggtgttgcaggcacccccctagatgctgctgtggggtctgcacaaagttttgctcctgccggcacccaaaaacactcatcctggctcccgtgtccactcacctgctctccccctcccacaaaaggtggaacacaactgggccaagcaagtggagtctgaccctgccagcaccaaaggagccagctagcctgtgaaggcatcagggaagtatcatgcttcacaaagacagctctcctcccctcctatgatacaaacaattgtattgatttttgtaattcactctgactatatagaccaagtgccttcaagcacggtgacatactaaaaagtatacatttcatgtgactgatctacaaagtagccctcagcttagctgagagttgactagcatcctgcaatggtttctgagttgggctccagtgggtctgaattattcagttttcttttttttctttttttttctttttttttttttttgagacagggtctcactctgttgcccaggctggagtacagtggtgtgatcttggctcactgcagcctccacctcctgggctcaagtgataatcccgcctcagcctctcgaatagctgagactacaggcatgcactacaacaccccaggtaatttttgtagtttttgtagagacagagttttaccgtgttgtcccggctggcctcaaattcctgggctcaagccatccacatgcctcagcctcctaaagtgctggcattacacgtgtgaatcactatgggccagccttcagttttcatttgcattgttctgaaacaattttttaacattccatgttatacaaacatcacacaaacaagaagattacaccatttgtgatacgtacgtggttatagttcacataataggagacactattcaactaccttaaaatcagcttactgagcaccagaaacaacatgattcatatattggcttaaaagtccagtatcactgtgattttcctgattttttctttttttaaaaaaaaccatatgatgattatgacttgaggttctatccgggattgatactggaataattcttgaaggttggtggttggggacagagacctggtaatcaggcagacctgatttggaatctcagctgtaccactgattaacgtggcaattttagcaagaaacttagcttctctgaacaactacttcttgatatctaaagtgggaataataacccctactctgcagggttgctataagaattaaattcaataatgcatataaaggaattatactttctaccacatggtaattgctcaataaaatgtttttattagtggtaatcatgtatccataagcatagtaattgatatatgctgactcacctgaaaaaatggcaagtagaatttggaaatgacagcctcttttcttccttttttccttctttgcttccatccttccttcctttcctctttctttcctttcttcttttttccatctctctctcctccttttctttctctcttctttgtttctttctgaggcataatttacatacaataacatgtatttattttgatgtacaatttgatggattttggtcattgtatgcagtcaagtaaacgtccttacactgaagctataaaatagtgccatcaccctaaaacatttcctcatgtccttttgcaatcaactcctcacttccattctcaacctcaggtaaccactcatctgtttttgatcactatagtttggtcatttctagaattccatatacatggaaacgtaaattatatagttttttacattcgatttctttcacttagcatactttttgtgattgactcatgttaagtgtaataatattttgtttatttttattgctagtaatgtttcatggtatgaatatatcacagtttgtctattcactagctgatagacatttgggttgttttaatttttggctttaggaatactgttgctataaacacttgattgcaagctttcgtgtgaacttactctccttacagggcttagtgtgcccagaaaaaggacactgggttacaatgggaagtatagcacatcagagcatctaagttgtgtcttctccttgcctctagtgatgataatgagagtaataaagccgactttcatttatctagcctgtttcctcctctcagagaggctgctttcacagcccccactgtccccaaagagtcaggttagcttgtccccatctcatcactggttcattgagctgtggtagacacctgcctcaaactggaccaaatggattttctaccctgagaacgtgaaattcagaaacagggtcttttaaaattaattatgtatgcttaaactagaggtaagatagacttagctaggatgggcaatttgagtcgaataccaagacaaccgacatctccagtgtgaggaaagagacagcgagagtgagaaagagagagagagagagagaaagagagagagagtgaaactgcagataagcaatgaaatccagaaataagagactagatttcaagacagagaagtgagctatatttatttcaccctctttcagtactgtaagatgccacaaaatcctttaaactctgtggttttgccagatgctctgaaagtgttccagggaactctctctttggtttgaactaggttcagcaggcttttgtttctgacaaataaaataaccaaataatccctgactgagacaaatcataattgttatgaagatttgttgaatcctaactacctacctactttaataataattctattaatcctttcttacatcggatcaccaaaacaaccctgtaaggaaggatttttctttgaaggaactgaactaagaaatgagttcagttagtcgagaaattaaataatttgtataaggttacatgtttggagggtagcaggcctggagactaaattctgaactgcttttccccaaggtctctgatggaaatagcagtcccatgctggaccctgggtgtgacatgaaggagacagcgtagggctccatacagctcccccagcttggtgatctctctttatatatctaagaaagtgagtggagtaataggcattgagagggctcctgtctatggactccactttctctgtgaatctagattatttgctgttaataagggaagatttgatagtgttggatatttgaaggaagtcatttgtgaatgctatcagatgccaatttggaaatgcagaaagattataagccagtatggtcctataaggactatatttcatgtaagtaaagttgagagaaatagagacatttccctcttaaatgtttgcctgttggtttgtttttacattcattttgtggaggaaacacatgactttaaaaaaatgtaaactatttctgtttcttcttatgagtgaatcgtggtgggaaagacttcatggacagagtgaaaatgaaagaaatgctttctaaagcaaaacacagaaaaggagaaagctggctaggaggtgataaggaatatgaaaagactccaggagttataagagagaactcagaagttacagtgattcccctgcctggtgggcttcagaagcatttgtagaatgagtgcagcataagttttagtcatgcaatttggatgtgaatagagactttgcactatctggcctttcaccacttccttttcttttctcaacttgggccttctcatcagaaactgaggattgttacacctcacaggctagttgtatcaactaaatgggctgtccaggagtggtggctcatgcctgtaatcccagcactttgggaggccaaggtgggtggatcacgaggtaaggagtttgagcccagcctgaccaacatggcgaaaacctgtctctactaaaaatacaaaaattagctgggcatggttgtgtgtgccagtaatcccagctactcaggaggctgaggcaggagaattgcttgaacccgggaggcagaggttgcagtgagcaagactgcgccattgcactccagcctgggtgacagagcaagactctgtctcaaaaaaacaaaacaaaaaaacaaaaaacaaacaaaaatcctaaatgggttaatgcaagtaaaatactaagcctgctgatatagagcaggtgctcaataaatgtcaggtttcctatcaccacttcatactgttctttgagacattcattggtttttcaactgtttgcctttaggaggatttcttctggtctggacaatcgaagaggttcacagtgatgcacgtcatttcctggcctacagtgaagtgacaattgtacactcaaacacaaatctagatgtaaatatcacagacttatttgtagttattaatttaaattggttaaaacaccttcttagttacagataccaaagagcttaagtatgtggtttaaagcattagacgcaaaaggtattacagacgcattcagggatgatgggtatccccggatcctaaggcctagtgaatggtctcttctgtagaagacagagaggataagagtggggactaacaattcaatcttataccaaagataaataagtatgtatagatatcaacataggtatataggtatagataaataggtataaatatatatggatatagttctaaagcatactactttacactctgcatacaaaatatattagttgatagctttttatatttagccttgaatattcttttgtgcagagagactttataaaatcaatgtgactccaagaaagtattagcaggaattcaggccctgagaaagacaagcttatggagcaggtaaaaagtttcataattgggtcctccagtgttgtgctaaatacagacagaactgtcagagtaggcttttgacatttgcccatttattcttgcactaaaatgagcaatttaaaaacggttggaaagaaatcagtggctatttttgaacaccatcctctgaaagtacagcagataaaaacaaaacagaacaaatatatggaaaaatatgtagctgatatcagggaagcccaaaaaccaccttagagttacacattttccaagatctcaactgagcttctgaaccactcccagtcaaatcaaactcgattatttgtaaagatgctgtctaatgatcagtagaaagtgaagacacacaggatatgtctccatcagctcttaacacacgttggctcccaaaccttacaatagctcaaacttctcctgcaagtttgatccacaaagtgatcctgaactaacacgagcagcccaggcatgatggcatcaccccagaacagaacacttcctccaggcatacattgtctgtgagcttcaaattgcttcttgtcctgtattgtttccagatgatgagttttccataaatgttgtctcttgctagaaaatgttatattccagcatctacctttaaaggcaactatcaaaacaataatctttaaagatctgcagatgcctgtggagatgagactcataattactctgatgaaattgttgtctttgaacatagcaatgaagagttatttttatttgggaaaaagtgtagaaataagaaaatagcatagtaaggctgctcttgactttcgtacagcttcagccttttcatgaaacataactcagatgatcttcttctgaattagtgaaccctgatgttagttatataaccaggggaccacggtgtcagccttgttattttaagggtcttttccagtctgcaagacccaaccaatttccttcacctttcacatgtggacttctcattgttactaaactaaccatcccttcctgctcatctctacacatactttaggacttattgatttcatggacgttcatttgtctcacaaacttggtgatatagaaactgcattttctgctttggtgcaccccttagagagcctagtgtggttcagacaaacctgatgagatgcacaacttggaggtctcgattttctcatctgtaaaactgggcaagttgttataaggattgtgatactatacaggaaagtgctaaataccgcaggcacagatgaaaggaaatctttccctctcctggcacaatgctatggatgcaaacaaacacattgttttacctttacatatcatgagttacccagagttttctcgttcatgtatgaagggagtactaattcgtcatcaccaaagcatgagcatatttagaactggattttgagttttgtaaagatgtgtaaacttcccaggtgccagtagcaggcctgtgtagatgttgtcctcatcaaggatcagggactgcttgttgtcacgttcctgttgaggaatgcctgcacctctgaccagcctcaaacactgctgtagaggaaagattagaaatataaattatgtaaaatgcagatcattgactgaacatttgactgttcaaggagttgcattttactgcttggaataccttttaaagtgaaggagaagaaaaggaggaagggggagggaagggaggagaaaaagaagaggaggaagttgagaagagggaaagttgctccataatttacaaggctctttttttcacagtgggattattatttcccattatcacatgaaacaatcttcattacttttcttaattctgtcttcattctcacttcaccttgtccttttatatatgttctctcaacttgggaataagaaactggacctttacagctgggcacggtggctaacgcctgtaatcccagcactttgggaggccgaggcaggtggatcatgaggtcaggagttcgagaccagcctgaccaacatggtgaaaccctgtctctactaaaaatacaaaaattagccaagtgtggtggtgggcacctgtaatcccagctactcaggaggctgaggcaggagaattgcttgaaaccggaaggcagaggtggcagtgagccaagattgcaccactgcactccagcctgggcaacaagagtgaaactctacctcaaaaaaaaaaaaaaaaaaaaagaaactagagctttacgagaccaaatatatctgaatatctgaggctttagaaaaacagaagaaaggaaggaagggaggaaaaagaaagaaagaaagaaagaaagaagaaacagacaaaataaaagctttggaattgctatagaaaggattagattagatgactagctaagaccttttctcgtgtctgtatttggggaagagaaggcatgaatttccccttttagttaggtaaacgtatttttatattgagaacctcttgcataaggacaggtgaattaatatactcattgaaaatgaaatgacttcagagctcaaaaagatcttgagaatatctggcgcagtgtttttgaaacttttaagaaatcagcataattattcccccaatttatatttcagttaagtaaaattgactctaagtgcataaaatacgggaaacctggctactagggtttgaatcgaaagcagggtttgtgttatccaaggcatctttcctccccttcgctgtccttctctttctccaaggttaagtctgaggagttttctagaaaacctcaaattcagtggaacacattctacctccatcataatgtgaaaagaatctgtggtctaatctgatgaaataatttgctcgtggctagctgataaaaagcacttgtagctaacacatattgagtgatgaacctggactagatgcatgaagtacctaatctccccaccaaccctgtgatgtacacactcttatgacactaattttatagagaaggaaactgatttcagagagcttaagtgattagaagcaaatccatgactagaccttggtgtccttaaccctcagggcaatgctttggcactctacaatcttacctcctagaaacaccttcaaaaccaccctatgattagaactgaattttagcatctacaaaaattcacagttcacttttagttctctattttcctgggttcttcccaggaatttaagttattttgagaccagagaagcttaaggcattgacattccacatgccctcaggatttaacttaagctccaggctgtttcaataccaaagattttgcctcaaactttgccaccactgagaacttggggatgtgaaaaccactgaggcagcaatggcaaagagaagagtgggaaaggcctttccaggatccatgtgcagaattagatttgtgtaccacctgtgataactgggaaagatcttttttttctgttttttttttttgttcctttttttttccacgttggaggcaggaataaagcaggtgagggttccatcagagtatctgccctaatttcctgtaacagcaacaggagttacccattactcctattgccaatagatatcatggcttcactcctaaaccatactcagagcattcacttgttgatgttagtaaggaaaagcaagttgtgcataagcagtagtatacagcatgcttcagtacagtttgtagctatttgcttaactgaaatctaggtacaagcctcttcaaataacagatcttctttttctgtatgttccttaaagagaaagaggaaagagaaaagaaacatgcctggagtgagcatttatcactaagacaatttccaatttcatctcacgatcaggtttacttcccaatattctacaaccgtaccattttatcatgggcataaacattgagaataatgactcttgtgtcttttcagagcctaatttgtgatgagagaattttaatgttggaaacaaactttaaaggtaccgaagtccagacgtctaatataccctagaatctctctgcagctcgttggcaacagacatctggcccagctgtgatgctctaataagtccaggcaagaggaccatagcactttagaaagacatgaagcttactgaagatatgacttacaaatagagcttttggtacagtgcagtctgaaactgattttcctaaaaataaaatgctcacgtaggtctcaaataaaggtgcctcgctcctcagatagatagaaaatagtacaacacccaacctaaatagtcaaaataaaaatattgtgtatccaaaaaaaagttttagaaatgtatttagttaccacttggagccagaggtagttgccaacccaatttcattataagtgaaatttctagggtattaaaaatggctctcctcttcttcttcctctcccttttccttcttctttttctgttgattttttatcatttaattttgatccacaattctgtataacatctacatctcatatcaaccttttttnttttctagaattattctactccctgggtcagtccccaagatgtttcacttcattatggatctccttagcgctggtgctaaggttaaaacattaattctccgcatgctgagagttacttagctccatggtgaagtctctatctgccaaaagtctctgttcaaataaatatgtaactggtgattctacagcatgcattagaatcatgcagagggtttgttaaaacacagcctgctgggccccaccctcctaagtctctgattcagtggatctgagggagcccaagaatttgcatttttagcatcttcccaggtgctgcagatgttactggctcagcaacaacacttagaacaactgttctagaaagagagtccctagaactgttgcattctagttaaagatggtgggaatgggaggaagacattgctctataccaggctgttatgggcaaattcgggagataattgtgatgaggttgaaaggtttgaatttaatctccaaatttcagtcagagagtaagattcattaaggcttttttccatccccctgcaaagtccattcttccagccagctcttgctccagccctgctgtgatgagactctgctgttttctgttttagctacttctgcagctctcccaaccctggaaaagatgaagaaagatgatgattttgttctcagctcttagtctttagcctttggacagccatcaaaagtacattttaaggaaaagggggaaaatatgtctactaggagaaatgccttgtattagactattatatcagtgatttgcttttacttaatgtagtattgaggagaaaatgcctctcttttattattcaaatggtttgcttttactttaccaaattacaagaaagcataccaaatgcaggcttctaaatagtttaaactggtttaccacattaaactcaaaagagagtatttcattaaaaaatataaatggactggagctgttttctgacaatacactgttgggctttttttaaacttctacttttgttttatgaaccgaactactggtgtttaatactcaaagatgctcagcttttaggtaatatttgttgtaggaattcttaaaagccacagatactgctaatggggaaaaaacaacttttcttatgttgaggttatagcaactttggtggataacagttaatacaattagttttccatcagtttctctaaatgcattttttttttctaactaactttagggtattctgtatccttggcattgatttagtgagatcttcattacatggcatttcactttagtttccattgcagattgatatcacaggtaataactgaatctttagggtttgaagaagctgacctttctttaagagatctaatcatttcacggacaagttccagtggtatttctattaagaaatcagggtatggctgggcacagtggctcatgcctgtaatcccaacactttgggaggccgaggcgggaggatcacctgatgtcaggagttcgagaccagcctggccaacatggtgaaaccccatctctgctaaaaatataaaattagccaggtgtagtgtcacatgcctgtagtcccagctactcgggaggctgagacaggagaattgcttgaacctgggagacggaggctgcagtgagctgagatcacgccactgcactccagcctgggtgatatacagtgagactccgtctcaaaaaaaaaaaaaaaattgtctgtcttcatggtaagataatcaggactttaaggaagtgtgtaagacattttactcatatttttattaccagtttacattatggtttctaaggccattatgtgaatccaaataccatcttgaaatgaaaacacattaagctatttttaatctgcaaattatttgatcagctgcctcagatacatgaagaatctgatggcaagggcacagaatagctaaagtttaacgggaaagctggtactatccaagtcagtgaggtgaacacccagctgcagagcggaggctcagaaatggtgagtgccaagatgaatcaagccacaaaaggaatgtggaggacctctgaggtttagcttcatatattgggcaatgtttctataggcagtcattggcctttcgtcttcgtcttctgcactgattcagtcatttcatttgtagagtcttcctcaacatattgtttaaaaaaattcaagatttttcaaatttggttttaggatttcaaaaacaatcaggactagtatgagctattcattttttttttttttttttttttttttagatagagtcctgctctatcacccaggctggaatgcagtggccaatttcagtttactgcaacctctgcctcccaggttcaggtgattctcctgcctcaacatcctgaatagttgggattataggtacccaccaccacgcctggctaatttttgtgtttttagtagagatggtgttttgccatgttggccaggctggtctcaaactcccggcctcaggtagtccacctgcctcggcctcccaacgtgctaggattacaggcatgagccaccgtgcagggcctattcattgtttttttgttaattctctaaggattaacttttgggccatgttggactgacagattctgtcctttgctctgcttatgttttcccttctattttcaggtagtgattaagactgtgaagacagaaggtctgaattagcaatttttcaggcagctgacttaataatttagactaaaattcgttccaggatgcttgctcacctcctgcatgtggtgtcctagaaagcctcttgtttctccagctgtcctccccggcagcattggcatcacctgggagattgctagagatgcagatcccaggccctcgcagatccatggagtcatcacctgcattttagcaagagttccaggtgattcgtgtgcacattacagtttgaaaaatattggtaaatattatggtcatcatagcgggttatccaactactggttttagctctgccactatctaattgtgtgaccctttgccagtcagctcagcttttcaaactgtgtttcatggagctgtatccattcagtttattactcagaggctgggtagtaaggtcagcagctcccatctgagccctgagcgactccagttttattagtttttatctgttaggctttaacttaagacactgtttgaagaaaaggtttgcctgtgaaagagatcgaaggcctactgtctctgatgagtcttaaagtcatttcctgatctgaattttctatgattataatatcattcattgataggaattgtttccttagcgaaaaggaaaaatctcttcatttctatacatgtggcaggttgacatttgtcaggtactgaggctgacagacagtttagctacctttaggaggttccttgatcaaaatagagaaactttgccagccactgaacttctcactgttttcctcatcttagcgacttaatccaggcctcaccccatctgtcactacagaagaactgtttacgagacctcactttactagcttttatttattttatcagtgttggttatttgggagcaaactgaccctgagctatcctttggccagtgccattcactttgcatacattgatctaaaaaggcaattgggttccgaggtctgagatacccaatgatattctacatgtgacaaagacatttccagtcctgcacaccctggtaacctaaagaaggccaagcatctcaattaattttcagttgacagtttctgcagctgagtccccaagtcagagtccctaaacaaaattgtttgcattctataggaaaataggacacattattagcccagttctaaatccagttccatctttcctcaaacaacagcaaatgttcttctcagattcatagcatggagcatcatccacttttaatgttttccatccacatagctgcattgccctgttacttatttacaaatttattggctttagatggcatattttctccaaagaactcaggcagttgaatgagttgttttagaagtctacaaaatatacccttactcattcacctgtgggatttacatgaggttatttcacattcctcttcatgtattgcgatggggttgttataaagatactcacacctttaaatcttcccagtagcacgtatattctgctttcaaacacaacaaccaagaaaaaagaaaattctactgaaacaactgaccaatcttctttccttagaaaaatcaatctcatcagtagctcatgaaattcaatttccctggtcaggaacaaagcagataatcatcccctaataatatttatggatgatagaaatgcagagcaaataaaattagcctctaaaactatcatcaagttccttgaaacttttttctttatctcaaggggatttatggagtaatggtaagtgtgtttttctccatttctatttaggccaacacacatcagaggcactcaatagatatctggtgaatgaatgaggagtgagtaaatgaataaagtaaaatacagatgaccctcaatttggacataatgcattcctagagactgcttcataaaggatattgcttaaaggcaaaacaccgactgcaagaatgccaccacttttgtctgtaaaattcattacaaattgacagcagataaagtagcatatatatctcttcattaggtaacagcaaataaatggaaaggcaaaagagggccacaatgaagcatgaacaatgtatagaattctagtaaaagatgattgcataaggacatttttaccttgcttctctttatgaaagtgtccatcaatatgaagaaaaagaagggaagaaccaccatcttctccatgacagcatgcctaaagctagtctaatcttctctctgtcttgaaaggttttatggatcctgtgagtctgcttatcacagtcatttgaagagagaaacaacaactgccaatcatgaaacagaggatgtgtgagatatgggcttgctgtgaaccaagatgatccaaaggggatgctgaaagcttagcagaaccaaatactcaaatagaaaaaatgtggctgatttgcttcaacagctttccgagataatataccaaagtggaaactgatagcttctccagatcatacttgctcattctgtccccgattcttgggcagaactctggtctagagagaactttccttattccaagaagcaccgtgagcagaagacctaaaacaagacccatagagtaaagggacatgggaaacaaaatggcaaatctgacatcagaaaaaaatgaagaagaaaataaataaaaaatatagccttcatacttttaagtaaaatgaatgtaagctagttgcaaaagacataaaattaataaaagataacaacttaataaaagatatcaaatctaatctgtctctctcacatgcacagacacacacacacacacacacacacacacacacacacacacaaagtgttgaaaggataatcaggcaggccgattttaagaaataaatgtaaaaataaagtcatcaaaaactgtcaccgcattaagaacctaaaggattaagaaagacaacatagaaaatagcatccatgagcatagaaggcttgaaataatcacagaaaaagaaatgaaacaaaaaaattagaaagcgattagatacaattttatagatatggaagtcagacatagaagatacaaattatgatataaattatagtctaaaaagagaaaaatataacacaggaaaatttaaaatatttgttaaaataacatctcctgaaatcaactaaaaccagaatcttaatgttaaaaaaaggtctattgtgttttaggaaaattttatgtgaaacatctcctgatgaatagaaagtctgtggccatccaagcagaaaaatcaagctagtctaaaattcttcatggcagaattgaatgccagaacacagaggaaaaattgtataattatagatactattatccaaggtttttctttttttttttttttgagatggagtcttgctctgtcgcccaggctggagtgcagtggcgcaatctcggctcactgcaagctccgcttcccgggttcatgccattctcctgcctcagcctcccgagtagctgggactacaggcgcccgccaccgcgcccggctaattttttgtatttttttttttttgagacggagtctcgctctgtcacccaggctggagtgcagtggcgggatctcggctcactgcaagctccgcctcccgggttcacgccattctcctgcctcagcctcccaagtagctgggactacaggcgcccgccactacgcccggctaatttttttttttgtatttttagtagagacggggtttcaccgttttagccgggatggtctcgatctcctgacctcatgatccgcccgcctcggcctcccaaagtgctgggattacaggcgtgagccaccgcgcccggcctatccaaggtttttatacccagtcaagctgttcttcaatgtaaaggctatatactaataagcaatctaggctataacacccatgatccttcaaaaaacaaacaaacaaaaaaaccagctgatgaaagaacctaaccatagaagataaatcaaagaactctgggttagagaactcattgaattggtattgaatctatatatacttagagataggactaaaaaaacactctgggaattatgataatagaaatataaatattacaaatgtattactgcatctttatattttatttttcaataattatataatcagcaactcggggaagcagttaagactttaagtttggggagaaatgatgcctctgattggtctttttggggtgtattaatccattcttaagctgctgataaagacataacagactgggcaatttacaaaataaagagaggtttaatagacttacagttccacgtggctggggaggcctcacaatcacggcagaaggcaaggaggagcaagtcacgtcttacatggatggcagcaggcaaagagagagaacttgtgcagggaaactcctctttgtaaaactgtcagatctcctgagacccattcactctcatgagaacagcatggaaaaaacttgccaccatgattcaattacctcccgctgagttcctcctacaacacatgggatttcaagatgagatttgagtaggcacatgcagccaaaccatattgggggtgtcttaggttaggttctctcgaaacagatcctgagacaggaatttgggtaccatggttattgagtgagtgctccttagaggaaggatgtggataaacaggatggggagacgttaaatgaagatgtggtctcagcttgagtccagcttcagtctgatcccatagagagttctggagcataaattgaaccacagtgctagccccattttgaggtgaggggctggacttttgttccctcctttcaatcagtcattgactgcaggctgttcaatagggaagggataaataggggtgtaactttagagctagatggctcgacttccatgctgggtaattccctgaaaaagagacagctgggggctttagcaccagcacccacagcagcaggggtctgggtgcatcagtctgtgaaagcgaatcttggcagtttcccaatggtgtctcctgtagagcattgatagctctggttgatgttagctttccctgtcactgactggtcctttattatcctttattatggcttataaatgtcagttttcagtgtctgaatgcatttcactgagagaaggaaagaaaagaggcgctgtagagggaaaaggaagtggggaaaagcctagactttttttaaggagaggaaatgtgccagtgagctttgtggaagttgtttcagcatggagcagttatacatgttgccagatgtggagtctcaacaatctcagagggtcagcctctttagctatgaagtgttgctttatgccctccagaaattatccctctctcccctccacctgctgctcatcccatcccccttttctctctactcaccctaatgatccatctcacaagagatggcatgtctcaaatggcaagaacaggaagtgacaaacatagacagtgttggtaatatcgaaatgaaaagaaataattgtctctgattaagatgagactagaaagacattgacattgctctttgtagcatgtactagggagcacccaaatctctaagagaggactaaagtgtggcattttgcaaacttactttacaattgtacccattgtctgttgactattcagtgggaataacattctacaaaaacattctttagcaaatgtggatgtaggcaatgagatccagggggttttcaagaaatacaggtgaagatgacatttgtgctttagcaataactcttaaagaaatgtggaggatgggttagagaggaaacagaatgtcagggaggccagtgagggctatttcagtagtctaagtaaaaatattaaagtcctgaactaatcttagtagttattaaagcaacctcccagataacgcaggatcccatatccctgacagaagagccactgatgcttctgtgtccatgaaacagctaataaaaactgatgtttgagcctaagcattaagaatgttttcctgatagggagctaaaataatctttgaaaatcacacccaaaatattagtcctgccctttgaagctatgcagaacaggttgcttgttcactaagaaaaagatgtatatatcaagtgctgtcttacaagtgggaatacaaaggtgaggaaggcatagccctagctctcaaggagctgaatatctagtgagaagaaaaagacatactcaagttttgttgcaataaatttcagcagaggaaagctatagggattttagaggaagaggtgaatgactgtccaggcatgctaagaggattcatggtgcctttatgaaataatccttctgatataggagggaaggaatcaagtccatcctacccctacctcctgtttgtttgtttctcagtttgcccagttcttgaacttgttcttttattacatgaatctaaatttcattgaatcccattccttcttcctctggagattttgtacttttccaatgtttttctttaaatgtaggcttccaatcattggtcattgtctcagctgtgatctgaggaacgtagaattcagcatagtgtgctgggaagtggcaatgtacccaaaatgtgtgtggaaggcttgccagtatattagcaataccttccctctaccctttgagttctccttagaggtttaactcactttctaagcctccagaaactgtatcctatgttcctttatattgtattagaaataaagaattggttaaactcaaaataaatagatgttagtgcattaacacaagcctgtacccattataaaaatgtatttggcaaagaaggtaatgtttaacccaaagaaatatcctttagggaagggattttaggcaccttaatgtaaaatacacatttggtaaagaggccctcttcagtacacttgagtcacaccatatattcaatttctgacttcataagaggctaggtcctgataaaaatattgaaggaacacatgtgttaaaagtgtagtataacatctactattattggatgctacataaaaagcatggagctaagcaattctccatgtattatgatcatgcaatttcaacaaccactctataagatatatgctattatctccattttacagatgaggaaactgaggcttagaagtattgttcgagatcgagtgaaagaggcctagttttcagatcaagaaatttgattccagttttgattttatcacttactgtgattttcgcacaagtcatgttactatgtttaaccttttgtttctcacctgtaaaatgaaggaagatgactaaaccatttcttggggctgttccagttgtatgattttatgaacatctccatgaaagtatctttatttagcaaatagccaaatctgagaaaaaggcaaatttattagtctttctagaactctttagcatcctacctttaccatgaagcattactccacattggctggcctgtattctttccaactcctaaacagtagctcttctttcaaatgtctccctctatttaggcacaagcaaggtgctgaaaagcatgagaaatatgagcataatacaaggaaatcgataaggttaggaatcttcacacgtttaacttaatcatatcagacactgaaaacaaagtcatattttattgccaaagagaaatgctctttggcaaaccatgatagtaatctgattgtgaacaatgcttattcatcatttctggggcactggctgctgtgccagccaaggggacagctgacctaatgggcttgaagttgcattcctcaacattagttatgttgttgtgtgcaatcaccaacacaaagatagtgtacattggtcaatcagaaaatatgggctccttgcttgtttcccgttctgtttttattgacgattgggggataaattgcacagtgatagccaagagcataaattttctttgtacttttatataatcttgtttctcattttacaatatctgtatttattcctaaagttgagaagaggatcagacattacaaaacaatctggaaaaggtatggtaataatctaaaatatcccatagaaaacacctttatgtgttgccctaggtcactgaggcagttataacaaaaaatactatagactggatggtttaaagaaaaaaacagttatttcttgcagttctggagactgggaagtccaagctcaagatatggcagatttagtgcctggtgagaacctgcttcctggttcatagaagtctgtcttcttactgtgtcctcgcatgatggaaggaatgagagagccctcttgggtctcttttataagagcactaatcccatttatgaagtctctaccctcattacctaatcacctccccaaagcccccatctcctggtaccatcactttggtaagggtttcaacatataaattagggtgggggatacaaatatttagttaattacatgtgtatttatgtctcagagatgaggaggtcttagtttcaaatagttacacctatgcaattatcattccaaacttaacttttcctgtaatcctctccttttgatgtcataccatttgtacactgtgtaaacagttactctgggacatagtccataatttacactcccttttccttaattttactttgaggttccttctcagggcttcctttggactctgtggttacctctatcataactcttatcacatagaatgagatataattatggttgtgagatcaatctttagacgagagtttattgattgtttgtgactagctttgtgttaaatgtggggtcactaaatcctgcatacacttcttttcaaccaggtattgtttcaataattccctctatctctctataaaaaattgaattccttaaacccgggagtccttatggatcagagcaagtgagcagcacatcgcattctaccaatttagcttttttacagaatcccagtccaaatgggactattccgtaatgttctgtggtcgtaactgttgtccagtgtgattggcctggttttcttaggcatgaaacatgatgtattaattatgatctgaacagtgagccagaagttactgtatctagtttgacagtattaacatttatggcacatagttaaacaaggacttttgattctgaggtaggaggagttgggaagatatgagcagaatttttatacacgggggattctgattagaggatcaacaattacaaagtatagttatgcaccgtttaatgacagagatatgttctgagaaatgtgttgttaggcgattttgtcattatgcaaacatcacagagtatacatacacaaacctagatggtatagcccactacacacctaggttatatggtacagcctattgctcctaagatacaaacctgtacagcatgttactgtactgaatactgtaggcaattgtagcacaatgataagcacgtatataaacatatctgaacatagaaaagaaatagtcaaaacattgtgttataatcttatgggactaccgtcatatatatggtttgattttgtccaaaacgtctttctgagacacatgactgttgtctcacacaataaagagatagaaccttcataaatggagagtggagtgtcaatgcaaagtgggattaaatcaggaacttacttgaagacggaaagaggaggaacaccttcagcaccatctctcccatccttatcccaaaacactgatgactttacagccacctcccatacacactgcaagcacagggcactgcaagaagctgtggttacagaggagacactgcctaagggatcagtctgagtgccactggtatcttatggaaatacaagccagggactatcatagtcaatggaagaggattcgtgttaatgtcccacagtcagccagaagtgcttgtgactctatgcataggcacagtgcctttgaaaattgactttcaatcactttgtgagagtgaacactgttactgcagggtctagctgctccacccattgttctagatgggagataaaacagcctaactctagctggatgctcagtccaaactctaggatgagggtcaaggcagggactgcactattcattcatgtttgcttttctgggactcctataactgatgccttggatttgtgggatggttggttatgaccagtggctacacctgaggaactcactgtagcttgatggttcatatagatttgagattaccaaaatgttattcaacattcatactagatggtcttgagtatacttcaaattcagcatgttctcatctgaactcacatctcaacatcaccacactgtccctttcctttttcttatattttcagagtatcagtataaatctcattgcaccaggcagaatctgaggagaaatccttgcagctccttcttcctgattcatcatcaaagcctactgattttgcctccaaaccattcacttctgttcctctttacatatggacaatgggaggaactgactaaccacttgggcttgtcattctgtttgacccctttccccagatgtattctttgtcctctgccctattctgccttgaccttgacttatgccctccaagtgggtctggctgagaaataactggcaagagatgagcattgggaaggggagataggaaaatatttatctccatctcttgctttgtcagctcttctggttgctactgcccctacctgccaggctttggtaaactgcccctctccttgtcccttcaagctatgatgtggtgcgccaatggctgagtcttcctttttgactcctgaattttgctcatatctgtgttagtgactcctttgctacattttctttaggccaaccactttttttcttgaagaacgctggacaacccactatttttcccatactcatgttgcccacttcaaaactgctcttcatcctctagagagtggtcttttaaagggtaaatttgaccatcacttttctgattaaaactctccaaggggatcttgttgatcttaatattgacagaaatagctctaatgtggcccacagcctgtatgagctgactcctgtctgcttctccattgtcatctcttgtcacagtcactgggttccagccatgttgctcttttattgttccttgaaattgccatgggacctccagttttgaaggtcttctttaattcttctgttttcagaaattctctgctcctttcttgcctcctcccatccctagcctgcaattttataggaagtgttacattcctttttaaaaatttttattttaaattcagtggtagatgtgcaggatgtgcaggtttgttccataggtaaatgtgtgtcaggggggtttgttgtacagattatttcatcacacaggtattaagcctagtgtccattagttgtttttcctgatcctctccctcctccctccctctgtcctctgataggccctgttgtgtgttgttctcctctatgtgtccatgtgttctcatcatttagctcccacttacaagtgagaacatgtggtatttggttttctgttcctttaatttgctaaggatgatggcctccagctccatctatgtccctgcaaagaacatgatctcattcctttttttatggctgcacagtaggaaatgttacattcttagagaaaatcttcctcttcatgacactttatgacatttctgccacaggagtttgattctatagttaatatgttctcataacaccttatatctttgctccaaagcatttatgatggagtataattacatagaattgtttcattgatataaaataagttccagtgtgtgtggaaggatgttctgtgccttgtttttcattttatctgtaacaatttgcacaacttgtggcaaatgattatcattttataatagttattgggtaaataattaaaaagtatctctagctaaggccaaccaggacagcaaaaataaaactaaaatgaagagcacttgaatgagacagcaacagcagtgaaagtagccttccatgattattatcgaaatatctgttgggagttaagctgaaaactgacttgaggagtttgggaataaacatagcccacagtcagaggaaggggctcattcaaaaacatttagttgctctcaggtcaacgataggtctcaaattccatttttcacgagcatccacaataaaacctcagagcacaagccaataactcaagtactcaaatgccctccagggttccttccaagttgctctgctgacctgagctcattacttttatataatgattgcagcagaagcatctatggaagtactgtctacaatgagatagtcaaaaaaatactaaggagataattacagtattaattcttaagttttgcagaattaattaaacataaaaaatattattttggaacatcaagtttggatatatggtgacaaaacaaaaccactgctggccagtgagaacttctagggaatctatattatacatttttacattatgtgaatttgcataagtaaattatccagaataatttactcatgtcaattaacagaaaaaaaaacatgacttaattaaaatctcattacaggaactctcttcaatcaataattttggaaagtgacagacaaagatggtccacagggggatacatgaggacaaacatagctttagataagactgtgtttgcaccctagactggaatgtctcttcctcaaacatgtattaagccattccatttactgagcacctcttatattctaagaactgtacttgtcatcgtggtgggggaagggaggcataaataagctgtgatacttgggacaggacaaccaaaacctagtttccttcaaataggacttgagtcactcatagaagtctttcctaaatattccggtcttcaagaatttctctgaagacttctaaaaagtactgcttatgtcacgtgtgaatcctttcttgatgatgatgatgatagagaagtatttattatgaaagaaagaaagagaaggagagagagaaagaattgacatgagccaattcccaaaataaatcttttatatatatatgtatatatctctccctatatatatctatgtataccatatatatatatttatatgttacagataaaatgaatacatatatatgtattcatatatatatatttatatgttacagataaaatgaatacatatatatatatacctatacacacatatctcctannnnttctgtttctcttgagaaccctgattgatacatagatagaagagtgtatgtaaaacggaagcaaatagatcttcatggaagatcagttgggtatgaaagcaaagagctatgaaaagtatatgatgcttatttgcttattgttacttgtacagattttgatatgtattattgtaatgattacttttatgtcaacatgactgaactaagggatgctcatatatcttgtgaaacactatttctgggtgtctgtgaggatgtttctggaagagactagcatatgaatgggtagacagcatcaagaagattgccctccccattgtgggtaggcgtcatctaatccactgaggggcgaaatagaacaaagaggctgaggaagggagaatttgctttccgtttgaaacatccatcttctcctgcctgtagacgtgggtgctcccagttctcaggtttttagactcggatcaaaatatatgccatcatttctctcaattctcaggccttcagactcagactgagttacaccaccagctttcctagttctccagcttgcagagagcagactgtgggactccttggcctcccataactgcacgagccaattcccataataaatctccatatatatatatatatatatatatannnnnnnnnnnacacacacacacacacacacacacagatacacaccatatatatctctctatatatatgtataccatatatatatgtatatatacacacatattctcttgagaacccagactgatatatagatagcagagtgtatgaaacgtatgcacagtctataaattatatagtaatcacctatctacccacttacctacccactacccaggtaaagaattagaatatggccagtgtcttagaaactttctgtatgtctgtcctcgattacattctgttttatcccaccctccagaagtactcaccatcctgtttttaggttaattacttcattgcttatacttatgatattatcaacagtgtaaatgttttcaaataatatgtggattagttttgaaatttgaatagctgtgtaagaaaagagcaatattgccactattacacaatgcctcccaagagaagagaaatagaagtctgagaaatctcatggtcccaacttcatggaaagtttacatggatgagtctcctctaggcatgtcagaggccccactcagaccacgtggtggggttaaggtgtgtaccatgtactggatatccagcagggatatgatcaggggtattctctgcttctggactcatcgttccctacctacagctctcagagtgggtcaaagctgaacatttctgtgaagcaaattgagtgtcttcagctgattcaggaagcatggcagagtggacaggatatttattagcacattgacaagacaaagtcagaccagctactattgagaatcatgcttaccaaggaattttattctctggtaaaaagttggtatgaggtgtatgtatcatggcattgggcatcttagcgtgtataactttcagtgcatctgactcttggggtgcattggtccaaactctgggttgcccttgaatggggggaactctgtccttctgatataacattttatggtgctccatagattctcacatcctttctcctatgttgaatgacctgcttcctatgtcttgttctttgttggcttattattaagtattattattattactattatcgtagagctcatatttgagtcacttcttaagaaaggaaaaggagtgaacaatgagaacacatggacacagggaggggaacaacacacactggggcctgttgggtggtggggtaggcagagagagagcattaggaaaaatagctagtgcctggtgggcttaatacctaggtgatgggttaataggtgcagcaaaccactatggcacacgtttacctgtgcaacaaacctgcacatcctgcccatgtactcctgaactaaaaataaaaattaaaaaaaaagaaatgataagagggaagtgaatttttgaatcttgaatgtttgaaaatatctttattgaaatatcatattaattgctagtttgcccgggtttagacttttagatcagaaataattttccttcaaaatttcaaaggcatttttcaatgtttcctttcagggttattgttgagaaacctgatgccatcccaatcctcaattccttatcccctcatttgaagcttatagaattgtgatttcactgtgctggaagctcactaggtcctttacatctaaaaactcttgtcattcacttctaggaacttcttttgaaatattacagtggtaattttctcctttctcactgctgtgatatctctttctagaacatctgttatttggatatgggatgttctacatactttgttctactttacagtatattctcttaactttatcttacaactcttcaattgatattttcattttatttcctgcttattatttgaatttctaagaactcattcaaaatgatgggaatatttttcttatgtgttattctctttttgtttcatgtctgcattaccctatccctctgagactatgaatcatagctttatgttcctttttttggtcttcttttggcatggtctctattttctcctagttcctctttgttctgtttgtcctttgggtctctgtattctattttagagtggcttctttatcttagaggctttcctttaactctgatatccagtaaacctaggtacctgttcatgattaagaatgaactactcagaggtttatttgaagctctcattgtctggtatgttgtcaactttcagattcgcaagaggagaatgctccagtgtctttggtaatttttccttgtgctgctcagatttcccagaaaaccctcccactcttcctcctgtaacagcagaaatctgactgccagagcaactgtcttggagattaaacagtcagcattatttttacatagttacttatttcctttgttttcagtatggtgcccacaccctcaactgtgcttgatgtccctagaaaccttctgttttgctttttacttttttttttttaagggaatacgtatcaacaattttatggtgcagcaaacatcttttagagtcatggagttgaagagaatggcaactagtggtctacctgattcttagatggcttcacccaaatatctgttactttgacctcttccttccctttatctgcctctcctggttccaaacatgactgggatgcccccttctggggccccttgaggatttgaggattctgtggtgtaacttgtgttggttttcaattttctttgatactgacttgtaatttaactttctcggctctatcaagttacttcttatccacttgcttttggcttctaaaatttggctgctgttgtcttcttttctttcttcccatttgcaagagtttgtttctacaaaaaaaaaacattgtttataatgaatttagtgggtttcatggggaaacaaaattaatgtatgtgtttaacctgtcatcttaaccagtaactcggctggtgtagttttaatgttaagctttcacctatttaacacatatttcttgatctctgtggagtgaagaagaacatcatctcgcctccataaattctaagacaattacttttggcatcatttagataccctttccttattaagtttaggatagtcaagctttcaagcactaaaagtgctgggtaataatggtaattagccaaattgggaaaataaggccatctctctacctcgtaatttccttttttccctctaggtttagcagtacaatttgaattaagacaaattcagatgttctctaaacatattaatcccattgcacccccaaattatacactttttcttcttctaatgttaaaatagttactaaaccagcgaatgttccttaaccacacttatgctacgagccccttatccaaacattctctcagtttggatgatttcacctcctgaatatctcctgcattttttccttttgtattttccctgctgcaaatctctcaaacctacctctttgattgctgtcagacagtttttttttctgaattacaaatatgaccatgtcactttcttttttaactcccaaatgaatctgtattgctttaataaagtctaaacttagagcagcatcaaaagctgtcaaagatgccctaactgccctcgtattttcaacctcatttttcaccatggctttcctgggtgcagcacttcagtaagaacacatgcaggtgtgtgtatccatggcagactccaggcaatttcatactgctgtgcccttacacatgctgctctctctgcttggagcatcctccttgtgctgtctcctctggtgacatccttcaaaaccaggttggatgtctctaggaatctctcaccagccctcttgaggttgggctcagagccccttctttacccatggagagtcctctgcattggtgcatcctgcatcgacatggtttgcctgagcttccatgccctcttggagccccatgattttattcctcatgtcttgcatgctgcctgacagtgtagaatgtttcctactgtgagaatattgaatctgagggctgccaacagatgaatcttttcccttagaggaatgttttacccatttccataattatttcagccatttagatttaaaattcactcactggcctaggattaaggtaactttagtgtattccttttttttctttccttctttctttctttttctttttcttttttttttttttttgagacgtagtctcgctctgtcaccccggctggagtgcagtggtgccatctcagctcactgcaacctctgtctcccgggttcacaccattctcctgcctcagcctcctgagtagctgggactacaggcgcccgctaccatgcccagctaattttttgtatttttagtagagacaggttttcaccgtgttagccaggatggtctcgatctcctgaccttgtgatccacctgtctcggcctcttaaagggctgggattacaggtgtgagccaccatgcttggccaactttggtctgttcttcatgagctgtttaatttctctgggcctcagctatgtcattttaatcattatttgtttagattcatataatttaactctagcattgtcatctttctcaaaatccttctgtcttttcctgatacttgtccctccagccccatacatccttttctggtgtttcctacataaagtttgctgctagcaagctctcaataagttcacccaagttttagctaataatttcaaatacactcccaaatggatttgcattactagaaagagttctggatgcttgaaaagtcttataactccaaagattaaagcttcctatggatgggagatttcatagtgctcattaaggatattgggtgaaggggctctactctggatcttctcctcccaccacctaaataactgtaccacatgcctttaggagggtgtgtgtgtgtgttacagaacatggtctccaattcttttgcttttatttccagccaatgagctcagggatgtgagttggatagaaacagtcggctagactaccgtgagatctgaaggataggtgtttattttagtacgtttattcagagaatagcaggcacctaggaaggaaaaccgattacagagataaaaagcagttaggatctctcggaaggataggaattcatgtgcattcagaaagaaaaaaaaacagttgttcttgtgtgtgtaaggaaaatcatctctgtggaaataggttgtttacgttttcaagtcggcaaattcccttcacagccacaccacgtatcaaatagagaagggagacttttttttttggtccctggtgtgcacaaggaggatcccttgagatgcatcctcgtggagcaggaaagatcataatagcaataatgacaacaatgcatcaattgttctcaaaggcatctgtggggcagagtatgcttttcaaaggacattcacttctattccatcccatttgatcattatgacaaccgcaggagggagataagatgggtttcattatcaccatttcacaagtaagcatcctgagatggggacaatgtagagttatttttctggaatcacagagctagctagtggcagctttggagccagagcccagttttttctaagaatttctgtcacataaatggattatgtgtactgcatgaacacagaaatgcccaggatgtggagaaagcccaaacctctctcttacttggaagtctggatcagtggttctgggaattcgcagatttgcctggcagttctcttaagaggacacagaaaggccaactgggaaatcccttaacactagttcattgataccttgactatcttagccaggagaattggtgtttttattttccctggctagctgttgggtttgtaaatctccagagataaattaaggatttgttcagtggccttgaatgaatcatgaattgtttcataattgtttctttatgcaaagaagagcagaagggagtattagtggcctggttctttggacggtgtgtctactgacctggtatccaagggatgtgtttgctctgcttgatgaacagagaagaaagaagaggaaaggaaagcaatgctcagctcttccatgtaacacagactactctgcatttgttatcccatcagctcagaatgttaggtggcaagggttttggagatctagtgcaaacccctcactcagagaagggaattgagactcacagagctgaagtgtccacctaaagtccagggaaccagttaacaacaaagctgagactggaataaaaaagccaataggactagtttctagctaccattttcttagaatctcctttgtgcttgctacagtgatgcacacttgtgtatctgttgctctattgtttcttacattccccaaaattgagtcctattattccagtgttttagtgagggtaagttaggctagtttgaggtaacaaagtagcactgcaatctcagaatcattaatataacatagatttatttattgttcttgctactaatttagcgtagattagtgggtgacagatgcagcatgtatggaagtgcttcttcttgtcactgccaccaaaggacccagactgagagaatgtccaacttgcagtaggtgcacccgagagcacacatctctgggtttgctggggcaaaagaagagaattcccttctctgtcgttaggcccataagagcttcacatcgctttttctcatagccccttgatcagattagtcacacatacccatccaactgccaaagagctgagaagtcactgtcttcctgtccttcaaaggagatgaggacagacactgaggaacctgagagatgacagccactttgatcttcttgcttctactcataacctttaattgccacatagcagacaaagtgatgtttttaaaataaaaattgtattttatatatataaatatatttataattatgttatattacatgttttatttataactgtatattacatataaattatatttataattatacacataactattgatacaatatataaaaaatatattataaacacataattacatatatacaattatatataacttctaggaaaagtaaattcatatatatacatacacacacatatatatatacataaattcattattatttcacagctctgatggaagttccttccgactgtatttccttcctatcatcttaagataaaagacaagccactgtgccataaggcctctaggcctgtgtggcctggccttttctattctcatgcttcagtcccctaaacgtgtgctgtagcaggcatgctttcttccagttcttgcatattccaagtgctttctttgctcaggttcttgacccctgctttctttttgcttggctaattcttatgcagctttcacgtttcagcttcagtgtcatctctgacctgctctacgttccatgcacgtagagagcatgggtattttgttctccattatagattcagcacatcatactgcacctggcacaaagaatatactcaataaatatttgtttatattaattaacaaattaataaatatttgttaaatgattacacgcaagaatgaatgatcagaggcctcccatatacagcactatatgtagtcttctaaagcacattgacatagccataacagataaatcagtcacttagaacagcaaccatttatattcttttatattcttagcaatattattatgataaagatgcccacattgcaggtaatgataattccaagtgttcgcaattcatcacctgcctactggacattttcagcatacaacatattattatttttagtattaaagtacataataggaatggaaatctaaggtttgagtaacaggaaatgtgcaacatattttcaaagacagataccaccaattcagcctctctcatgagaccaatggagtgatattttccaaataaggtatcaaatgcaaagtgacaaaggatttttgcatcatttccaaatgtggaccagtacttaagaagagtagttttaactccctacattgacatagctaaggcaatttgatggttcggaaggacaatggcatggaatatgtataattagaactgtcatggagaatctgagacagattgttgtcatctagtcagatctcaacagaagaaaagtgattggaagcctgatatacctattttaaaaggtacaatgagtggtataattaaaaaggttgggtataagcttgacgaagttagcagatactcattaaaaccatttcagtaattcctataataatactggccatggttttaaagtcacctagtgaaagtcattatattgaaataattaaagaaaaacttcatattgtgtttccttggcaatagaacattcagatggagccacactaaatatttttctatttattgcagccatctccttaatgacacttttcagcacatattatacattaaaattgtttatgatattttgttattgctgaatttgatttaattacatcagggcttaaggaaaaggagtctaaactgagagagttcatgaagacttcgttttctaacagtttagcgaaaggtctttcaattcccttgcctctgcttatacgcctcctgctccccactcctaaaaccatacataaaatggtattgtccaatctcttcttagtcttaccttcactaaaggctgtgaactgccttcagaaatatactcgtaaaacttacacagactctcattaggaagctgctaccctccactcccgtcacagcttaactccaatctctttggtcttttaaataccttgtttcctctccatctttaagagacaaatagatatatctttcaagaatgtttcaaatgagaactcataactttcttgagggaattctcttgcccacttggaaaatagcttctctggcaggggtcgtgatttccgatgggggcgaagtcacggcttttcgcaactactctgtatttttgttttaaatgtacaggaatctcttctaaagttcagatatagacttatactcccctgacatactcggggggtctggatattttcggaggttgaagcattcatattccatccagtggtttgtatgaaagtagagtcagcgtgatcaacactggacactgggaggtgactctcggacagccaaacctctcctttctgtgccagcttcccccttaggaagaccctactataccattgtcaggaattccggaattccatactcccttcctcaaaacccccctttttcctgaaatccactctcaggaaaacaggtaagctcctttcaatatacaaatgaatcatcagatcttatactctagctttcctgcagatatttgagtaattgcagaaggctaagctttaagttaaagaagttaatctttgtcatttataatagaaaaaaaataaaagcaaatgactaacagggaagaaattaagtaagttattacttatacctgatggcatgttaccaaagcacattgacagaaagtttaaatttttttcctataaaattattaaacatttaaaacttgtagaatattaatggcaaaacatgcttatgccatatgttgagcaaacacaggaggaaagagtataatacgataaaaactatttaaaatgtcacagaaaaagactagaagtgaatagttgcttttgagtaatgggattatggtttttattttaatttaaaacatccctttattattttttgtaacagggaaaaatgtaagtgtaaaataaagaatggattctcaatgggagattttttttaaaaaaccagtttctgcttgaatatatatacatacagttttttttctttctttctttcttttttttttttttttttgagatggagtctcactctgtctccaaggctggagtgcagtggcgcgatcttggctcactgcaacctccacttcccgggttccagtgattcttctaccttaacctcctgagtagctggtatgacaggcatgtgtcaccatgcctggctaatttttgtatttacagtagagatggggtttcaccatgttggccaggctggtctcgaactcctgacctcagttgatccacaagtcccagtctcccaaagtgctgggattacaggcatgagccaccgtgcctggccgaatatctttatctactaacacctacactccttatttggtggggaatggcataccagttctccccacatgctttccagaaggctgattgagtggaacacttggagctgatgacttggatttacataagtctcatcttactaacacatcaaggcttttggatttaaacctcttcagcatcctctgtatccctaaggaatgcagtttctgcccctcttatccctgagtatagaggagaataaagctttggcatcaaatcgccttcagttgtggttgaatccaccatttgctagccgtgtgacctgggtgtctacttaggcaaggaagacaagctttcttatctgtaaggtggtaatctggtgaaataaaaatgagaaaatctatgttaaaaaattcttagcacagattctcaaacacgaatagttacttaatatctcatgactcattattgcactatgcctccaaaactgaatgtgcctcatagtgtgggttttatcaagattgggatctgcctctcatttcttaggatgagatctttcttaggaatacctgtggctctatttcctccttccccaatcatgcctgaaaccttggattggcaaagtcctgcttcattcaaataagccctgggtttgctcaagagaacagtggcttatcttttccaagttaatagaatacaatttaaattacgttttcaccacaaagactgagttaatcctgctagaggctttttccatttcctgaccaatacgatttggcactggaggagactatggtatgttaataacagtattaattgttaaaattcacttgttacaaagttttcattgtcttggtatcattataattttccttttataaggagaatcgacttaaatcacttggctgctctttgttcttcctgtttgctaagcactggcgacgtcttgttttcagcacttaactgagtgcacatctcagctctcacctaaagcctttgccaaggggctaatttccaacattgacagcatcctccactcctgcgtccctgaagcaaagctaaagaaaaagtaggaaatagcaagagggaagaagtaatttccttcacttctttctgagtctgttcattccttcttggaattcagttgagggttaactgtcttctcctttcctgcgaatgcttcacgccgcctcctggtgaccaaataaagccatactttttttgctgtctttggaaatattcttcatggctcctgtgggctgtgggagcaggaagccaacaaaagataaggtctcaaatctcttcaaacagtcctcacacttgctctgctgccaagtcattaagcaagcaaactcctctcccatacgggctgttaacttttatttgtgtagtgctgcttttaaacatggctggcctgaactcttttttttttttctccttgtattgagaagaaactgcccagcatctgctttgatcactgcaatgtctgctagtctactagacttttggcctatctcagatgactctttgaatgtagcttgttttttttgttgttgttggtggtggtggtggttgtttttgtttgtttgtttagcctcattcatgtattcattcattcaggattcatttttctaattcaacaaatttattttaatcagctagtatttgaccattctagatgttaggtatatatcagggaatatagcagttaaaaaaaaaaaagaaaaaatccttgcccttctaaagctcactgtccagtaggggaagggagctatgcaagttactgcatatagtgtgccataatgtggttaagtgctttggggaaaaagtagaacagggtaaagaagatcagaagaatcaatgggagaggtctatcattttaaatgaagtggtcaggatgggttccattgagaagtgaatgtgagtcaagactcaaggaactgcaggcatgagccaaaaagccccacgaggcaagaacgcttcagatcctgtgggaggaaaccaagacatagaagcttttgttcatattcttggcagtatgagtcattgggggaacacagactaataaagaatgtttcttgccttcaaagagtttatagtctaatataagaaacaggtccaaaataggcaatttcagtagactgtgattgataaaacacttggctaaggatgctttaggggcataaaatggtctgaagaaggtgatattgttaatggcttctctttgtcagcatttgttaaatggccttttgtagagtatagaccactaattacagaaaataagagtcattggggggactcaaatttgtttagcaaggtctatataagttaaatgatataataatatattaaaatttatacattaagcgtaataattaagtgctcaatttattgattatatttatataagctactacatagcaatatattattaatttatatttagattgtctcaataggattaattcatagattgattattttaatgtatggattatgtaaatgtagttcattatgtttatgtcaatatattaaatttttttttttgaggcagagtcttgctctgtcaccacactgcagtgcagtggcgagatcttggctcactgcaacctccgccttctgggttcaagagattctcctgcctcagcctcccaagtagctgggattacaggcgcccgccaccatgcccagctaatttttgtatatttagtagagacggggtttcatcatgttggccaggatggtctggatctcttgacctcgtgatccgcccacttcagccttccaaattgctgagattacaggtgtgagccactatgccaggctctcaatatattaaaatatttgttaagtaatatgaaattaatgtattttgtaaattaaatcattaaataattgataatgagattttatgtatttaattacattttatataagttaataaattttaaatattataattaatttcactttcattttaactacttttacagtggccactagaaaatttgaaattacacatgtggctgacactttatttctatttgtcagcactggtcttgattcactgaacagatggctggcttcctagttccttacctcttagcattccagaatgaacaaggttaccccaggtcactgagggacactgttgaggagaaaaagttggattcattgagatcaacatacaatgtctttccaactgccttaccttcttcttagtaacctgatgagtacttctcatgcaggggatttagataaaactttcttagactttctgtgtgaactgttagcaggtacatgaatttatgtgattcttcattctttttgcaaaaaaacagtctaagttttacccactctataaagtctgttctctatttttcagccgcttgtggtgttcatttaccattcaacacaggttaagcactgctactgctgattattataataattattattttgcgatagttttggttttacctgcaagaaaactcagtctagttttggatttctttataccgcaacccatggagcaaatgttactcatgtaaaactctcaatgagtgtcttttatctttgctgctgccatttcattacctgggacatttgtgccttgaattgtgtatgaaattctactttaaaacagattcctggtttatatactcatattgatggtctctattttattccttggaagcagttctgtgttctgtttcctctgtccccacccactctatacagttctatcattccattcttgagagtcataattcagcattcccccctgtatcagtccattttttcattgatataaaaatacctgagactgagtaacttattaaaaaaaaagagttgtaattggctcacagttctgcagaccgtgcaggaagcatgatgctggcatctgcttctggggaggtctcagaaagcttccaatcatggcagaaggtgaagggggagcaggtacatgacttggtgttgaaagcaagagcaagtggggaggtaccacacagttttaaatgaccagatctcatgagaactcactcactattgctaggacagtaccaagagggatggtgccaaaccattcacgaaaaaatcatgatccaatcagcctctgaccaggccccacctccaacactggggataacatttcaatgtgagatttgggcagggatagatagccaaactatattactcatgcagccaaacaccctcgctggtcaatctccttacagtgggcctgaagctctgaaatgtttttctggtctgaagattttgaatcttcccttgacagaacagtcaagccatactactcaattttaaagtggctggtgacatccgtatctcctaaggcaaagtgttctagttaatgatttgccacttctgctaggtgtgcacacttaattgaggctctgtatgagtctgatgctgagattagaagtccaaaagtcaccagaaattattacctggcataacctcgttttcttaattacaaagaaaaattaaatatcttctttccttggctaacaaaatagagaatgtatgtgggccataggcctgggaaatttaagatgtgatctgtctgttggattttattcttattctgatccccagacttctcactaaggagagagaagtccatttattagctctggaaggcaacatgattctgtggtaaaagcatggattttagagtcagatacattttaaatcccagcttcattgcacacagctgtgtatcagccccgcatcatgtgtgtgcggtagcacaaggccccatcaaaacaggcagtgcccctgtggtttaatgccctgcagttgctgctttgagattcttcataattttactttcgaatttgtggttcataagtgaagcccaatgggacgctggagcaagccctgggtcgctggccttctcacctcctgctacttccacccctccagggaaccactttgctgctcctccactcctgcccagtcacggctgctgctgctgcccctgcagggtctggatgcaggcatgggaggcatcggggttggcacctgctcccagggagtgtgacattaaatagcaaacaaaagcacaccatgcaggtcaagagggagaccacagaagaaaagaaatagctttttttttttcctttttgcataaagcagctgcattttgattttgtcctgggcatcacaaattttgtagctgaccctagctgtacaactctaggaatgttccttagccatttgattttctgtgtatccatcagagtaatggttcaagcagaaaagcaccctaagatatgcctgtttgtatgtgtttataaatatataaatatttgtgtggatgtgtacttatgcatatatgtgagtccagtgcatacataggtgacataagacttcagagattgtttaactgcttacaacaatagtagtatacctttaccagcacagggcagaatggctgtaagaacttcaaggttgctgaacctgtcactgtggaagagtgtagaaatggaccactgggcagatattccctctttaggggagcacagctactgccacactttgacccagcaggggtgggctggtgattgcattcaccgacttttctcctctgattctctcacctcatgctggtgccttcttctgatagaaaaaggaccagcagccccactgcagggaccacagttgacgtggtccctggaggccagccttccagggatggagtggggtgaggaggttggctagtagatctgtagggcaaataaagaatgcccagctcacctttagcagggttgctttgaagattacatgagatgaaataagtaaaaccctttataactggaaagacagaggcatctattattaccgttaagatgattcatctctatggagaaactggagcaagtttgagttcaggtagtgggattggaagagtaaagaaagttctgcggcattcctgattccgtcatagcaccatgctcagaaatggtgatgtcatgttaaggtacaaaataaaattccagtgacacagcctcaaaattagtaacacagagatgggggtgttgcgacatctgggttctcattctggctctgacacctttctgcagaacaatcacacaagtcacttgcctcctctcctcccctccttactcgtctttgagaagggcgggctagttacaggctgcttgtgaggattggagagatatctagaaactgctctgatacaagccacagcttttatgagcgagtcttttcctgggccaagcatggaaatctaggttggtgggtctctgaagcagttggttgtccctaaacagcgacttcatttccggagctactttttaagtgttggtgaaaacacaaataactggagactgtgaagtcttttagcgccgggacctgtggggcagtaacctccaacaggtagagtgaaatgacatcctttctctccacgcctgagtgttcctatggcaccagttgcttgtaatgggtgaagaaaaaattgaactcgtttctcctgagacacacatatgaaagctgactctaagaaagaaaaactgaaatgtggaccatcttatttagttccagttaaagagagatgtgtttaaagcactctgatgtgtggccttaaaaaaggatggggctgcctcttaaggcagaatcacacgagcacatagaaataaaaatcaaagcagttatcatatttaattttcttactgactagattcattttgcattagcaggggatggcgaaggagagggactgggaatgcattatgttcttatttgggtcatttccttgtgctttggggaactttctcttgtcagcgtgcacatgcatgccgggggtgggcgtgagctggccccatgcactcactggcttctttctcggtgtcgtatgacccaggagggagtctgcagcatggggtgattctccacatagagagtcattcaccactctcaaccccgtctccaggtacttcctgtgttcatttgagaagaggcagctgacttaaagcctcatttctaagcagactattagaaaacatgtccgcataacctggagcggcagctcacgcctatagtcccagcattttgggatgccaaggtgggcagatcacgtggtcaggagttcaagaccagcctggccaacattgggaaaccctgtctctactaaaaatacaaaaattatctgggcatagtggtgcacacctgtagtcccagctactcaggaggcaagggcaggagaatcacttgaacccaggaggcggaggttgcagtgagctgagattgtgccactgcactccagcctgggcgacagagtgagactgtgtgtcaacaaaaaaaaaaaaaaaaaaaagagagagagagaaataaataaaaaagaaaacatgtgggtacaaacaggaagagagagggcgaggggggcatcctggttggagacagctggactcacacatgcactttgtagccactcaccataaaggcagccccaaaggctctgagagctggagggggtgtaagagatcctatcctggaaagctcccatttcatacacaggcagacagcctgtgaggtgaatggggtgacgtggggctggaagagaagggcaagggtcaaaggaaagcattttacctcctttagaaaccatcatgcccccaaacctaaaacttagggaccaccgctgccttcatccatttgtcacctaattctctaatattccagtcttagtatcttttgagcccattttattcttgccctgtctattgccactgccttagcttctggcctccctcatttttcatttaaatgactgcaagtcttcaccctcagctttctaaaatgcaggtccggagactttactgttcttgctatatttcctcaacattcccacaccattctcaagacaaatcccaagggtgtgagcataggacaaagggccctctccatgatttaactggcttttaagactccagttgcaccacattacatatttgccaggcacagttctaagttctttacaaatgttagatcatttactcctcaaataaccttgggtgatgtgtatttttattgtctctacagaggagaaaactgagacacagagaggttcagtgattttccaaaggtcacacagccagtaaggagcagggctgggacttcgaccagacatctgctggcagagtcggtgcttttagccctggcacctgctggtgtggagtgctctgtatgaatcagacccttcctcacctctggcactgtacacaggctgtttcctcactttgaagcaacctttgctcctttctttgcctgagcatattctgtttgtttttccagattcacctcaagtaccacacagtgtctttcataaaacaagaccctgtcttacttggtttctgtgacacattataccagattgaaattactgattaatttgtctgtgtttccccagacaacctgtgtgtctctcaaggttagggacagtttctacctttctctcacttgcaactgaatcatgggggcacggaatgaaggatggtgcaaatggtctttcaattcttgtctctgactgttcagatcagacgagttacttatctctgagatgctttttataatagaggtaaacagagttcttcctacagcacagctattgtgaaaagcaagttaaatgatgactataaacccatagccctggtctggcacataatagatacaccacaaagccccctctgttgagtcagtctggtgtccttgcaatccatcctccactacactcatttttttctaagctcatttctccatctggactcatgcttgctatcaaggatgatctccccacttctaccatcacaattataaaaattcaaatccacctgtccactaagccttccttaactgtgtagctcgctttggtctctccctgtttcctaaaacatattctcagtgtcaacattctctggaatggtccccatcatgcccgctgcccccctgcctgaaaattttgactgtggatttatgtctcttatattctcaatgaggttgtatcctctcaagtgatcaaggctataatttttatttctttaccatatttacaactctaggagaatgacacgtgttctccaaatagtaaatacttgcagagctaaagtgaattgaagtgaattcctttcccaggtactttgctgcctcctagtgttgtggtgaggctccaggctgagagaagtttcctctgagctccagctcagccagcacccttctgagtgatgaacactgttgcagaccatagacctgagacagctggctgcggtttgacacagtttagaagatgctactacatcagaggcctctcttgtccattgggtcccttgtagtggacccctttgctttactcctgaactgagtatcagtagggcatctgtgcagggcttttaaagacttctttcctctctcaaatacctcccttcttcccagtttctgacctggttactgtttggagtttttaattccctctgatcttaaggttatattgcagttcatgttaacattcaaatactattgagaaaaataaaacataaattttccagttatctagattgtaaatgaatttatgatcctgacgagaaaaaggcatgaaaggtacccactctatgaaaaagtaaaatggggccacgttaatgagacagaaagcacaagaagcagaaagccttgtgtatgtcatagattaaccagaagttgtttcggctaggtaccggcagagacaacatggtacagtggaaggaacatggattttggtgtaaacactgaattcaaatcccagctttttcagctgttagctctgtggtgtgttaagtctctcagatcctcagttttgttgccagtgcagtagggcagcgatgcgtagctcagagtgtgtcatgaggattggatgagacaatatatgccaaggcaattaatacgatgctaaggggtttgtgtttttgaaatgcaaagagtttagttttgtattgattcccattacaagtttgctcctgtattttccggctgtctagtccattcacacatcttcatctcttagggaaaagacatggtgtctttaatgttctctgaattagcacagtgcctggcacttagggttgtagtaacaattatggaataaacgtaatgcctacagctaaagatgctgaaactctgtgactttccattatacattcttttttctttctctttttcttttttttttagaccaagtcttactcttattgcccaggttgcagtgcagtggccccaacttggatcacggcaacctccgtctcccaggttcaagcaattctcatgcctcagcctcccgagtagctgggattacaagtgtccaccaacacacctggctaatttttttatttttagtagagatggggtttcaccatgttggccaggatggtctcgaactcctgacctcaggtgatccacccaccttcgcctcccaaagtgctggaattacaggcgtgacagctgcaccttgcccattatacattctttctattctcagtttttatctttaatattttagagtcggagataatgactcccacatcagcaccccaattaaatagactttttcctgtttatcacctttcctttaatttcctcattcaaagcattattcagttgtcctctcctcttgctgcttaagcctctcaccagctctcagtcaatgctcccagatgcagctttcattgcatgtgatgttgtttaatttcacttgtcttatctataatcacatcaagccatttatttgttaataggctgtttggtggcttcacagttggaattgctgtacatcacatttcatttccacaaggacatcctttatgccggtctgccttatgtggcattcgtctcttcctcttgccaggctgggccagcttctcccgctgtaccttccacatcagctgttcattttccccctgctgctgtcactgataatttccaggttaaatcttataagtggaaattggatccacagctggagttgaaacgcagctccttggagttattaccacagtctgttcccgggtaggtgggaaagttgaagatgatagatttccagtgcctgggaataacaatgctgtccctctaaccacaactaaggtgagattactttcccctggggagagcgatatttttaccttttcactctgagtttacatcagggggattcaagagaggcgagtggtttttcagtagttttctgttattttatgagagatgagttaaagtgataatgtaggctggacagcaaataagttataagtgattgaccagccttttaggctgtcagctatctcaaatagaggctttctttatttttttttccacagtagaaacatttgatttatttgattcaaacagtagaagtatgagaggatcaaataaataggtttgttcaagaaaaaaaaatattttagtatttcatgctttcaaagcctatgccataacctttgaattattcagcaataattaattcaacaactatttactgagcagcttccactgtttcaggattggaaatatcagcgcaatagatcacacaagattccatctttttgaagctgggcttctagtggacaagactgataataacaagacaagatacataagatgatttccaatgtactaggaagaaaagaaaacaggaaaatgtgagaccatcttgggtgagatcatcaggaacaacttttcataggagagttgatgttagtgaatccataattgctaaaggagatttgagtaattaaaaggggtccgggttgatctatatctctatttcttttctctccatcccatgctttcctctctgacccaccccagcccctagtaaccatcctgaggtcagaaatatcaagataccttaaggggctttctccttaagatgtcaacaacatccactgaggactgaatagaagatgccagcgcttggctcaggtgcaggggatggcaagagctgagctctgggctgtgaggagttctggttctggtctggcctcatcactggggctgtgtcaccttgggcaggtcttgccccctttctgggccttagccttcattttcatttgtgaagtcagtgtgatcagatgatgtatgaaatttcagaatcgtatagaagataacctacctattaccttaaacagtccgcgtgggaggagaaggtagcaatagttgacatgaggttgtgagggatcaaaatgaggctctcagtgctaccctacacccctcaactttgtcacactgaatctgacctggaaggtacatgtagggacagtttcttatagagaacacactatctaataagtggagacatggcatgtcctcaaaacatctcccttattgcccattccgggctttaacatctgccccttccaattactttgactcttcaaaggttttcagtgcaccttaaatggtttgtacatcttctgcccccttggatacaacagcatgcacggacatttgcttttctgattaatccctttgctaccaccctcaactcaaagcattacaggtaggaaaatggactcaaagatatacaggttaataaagagaagaggggaagagccaggagcacaagcagtgtccacgggctgctggtcccagccagtgagtgagcaaacataatggacctgggcatcgaggttgggagaatgctgaaaaagaaatgccaaagtcaatttaagccatgttatcctatttcctgggattggtgctgggtactgaacagaggctctcagccaacccctacctcacccagagcacagtatagagtatagacactgtcttgtacacactcagaatacaatagtgatgtgtttctgtgtgcagccctggactgtgtgaagtggcttctcctggacatgtcaactctccttgcttgtggcaggacatcaaaattggttagactgaaagtgtctaatgagctactcccatatgccaagcaccattttcagcaacagggactcagcagtgaacaagactggcaagatctccaccttcaagggtcttatattgtagtggggaagacaggaaaaaataggcacataaagaaaagcaaatcaatacatttcagttgctgatgaagaatgtaatgtggataagaaataactgtatgggtatttgtgttgctttaccctgcatgattgggaaagtctctctgagggatagatatttgagttcattcattcaacagagataattaagtaccttctatgctgcaggcccttttctaggcagaaaggattcattaatgaataaaccaaacagccccatacacagggagccttctttcagcaagaagagacaaagaaaaaatatttaaagtgtaattttttataataggtataataaacttcatatttaatgatgtataactgatatataggaacagtaatcattcttattgctttattgagcaatgcacatcatatataagtgtagttgtaacccaaatactaagagggtggagccacttaaagatttggataaagcacgtcccaagaagaacatagtatcctcaaggcacaagtaacatcctatgtgatggaacacttgggccaggaaggcatggatgggaagataagaggttgaagagagagccaggagccagatcatcaagccttgatttcatccaagtttcaagggaaaagcctgggaaagttttaaggagatggcagaaggaattggagagatctgatttaaggtttagaagattctctctggcagttggtggagcatcaacttagggacaagaagggcagcagggagatgggtgagggagctgctacagaggtctagaagagagagggtggtgacttgaactagggctgtagcaggagaaacagtgatacatagatgatacatatatatatatatatatatatatatatatatataggcaaataatagatgatagatgagtaaatagataatagatagatagaaataggtagatagatagatgtagacctgacagcgtaactactgaattggttgtaggatgggaaggaaaaggagaaattaaggttttcccctaggtttggcctgaagagttgggtgaatgttggggccatttatagagagaaggaagactttgtgggtagtgaagagggaatttggaggacacaagtaaataaatagctcagtgtgagccttttacagtttgactttatacagtatgcaaatgaggatgtgaagtaaatagatatgagactacagttttgaggagtggggctggtatttggaaggcatcagtggtgaaatggcatttaagctagggggaggatgagagcaactaaagaaagtgtatacatagagaagaggtttgaagactgagttctgggacattttcagatttggaggtctaatagatgatggagtcccagcaaaggagggcaagaaagagtggattttgacagaggaagaaaactgagtgtagcatagtaaaattctagattcatgggaaatgttgctgaaaaggtaagatgacagagaattaaacattttccttgagaagggatacagttaccgattacctttaaagagtgtggtggaggaccaaaaccaactggagtggggtgaggagaaaaaatagaaattagggagtgtcaacagatagcaaagacagcttttttttttttttttttttaagaattttgcttagaagtagagaaaagtgctatttgttggatctctagttggagtcaagagttaaaataaattatagaacaatatgtaatcataaagaggtgagaaaagtgtggatgaatgctgtggcttcctttttctctctagtagtagtccctagttggtctgcaatgaacttttgcaagaacgagagtggggaagactcttcatgaggctgataggctgtagctctcatggtttgtctttaacccacaggtagtgagcaagccatttgctctcagggaaaatgtggctttcctgacagccccagatgatccatctgtctctgcagcctataggtggggcatattggaaacaaagcatttaataaaatgtaatagttgtgactcgggacatagaagaggcagattgaaagagaagtggagaccaacacgccatctttccacataaatggcttcagaaagctgcagactcagagtggatttgttcgtgcaatcctcacctctcctactagttaacaagtcggcaagccagcagtgagggtttggtttgtaccctcagttattaaccattagtatttgtgtcatgtgcttttgcctgggaaggtgtccagagattggagagtagtgttcagtcttcagtgggtagaaattgatcaactgtagaaagaaataagttatcatggatatgtacatcagctgtgtcttgtttctaatggctcggctcgcgactagctgaaacaatgaaaggaaaaagtgtgggtaattttcaagtaattgatgtatttggggctcatgtaggccacaatcatgatagtcacctaatttgatccttatctcagagccaaatcttctcacagagttgttgacatgggatgtattttgatcttgattttggagtcttgaattctttttccaaatgttcattcttctccctctgtatgtccctcagcactagattttatcatcaggcacagaacatctttctgagtaatctcttccatactccaggtggcgaattaaaaactatgtgaggatgactggaagtaaaacatttaggcagtacttgctgctctggagacattcaaagaacaataaacacttctaatgtagtatttactgacctccagaagtgatagctgatagtgaagacagagtgcccgggcgctccaggctattgctccatgttgagattggctgagaggtcttcggaagtcctcagattgaatggtagtttcactttaaaccaagcaaaaattgtcatcaaaattcatgactctctcctaccccagctttcctccaactaattgggctctctttctggtcttgaatgcatcgagtttttatttgtctcagtgcctttgcactttctgctctctctactacaaagcccttcccagggccctacacatagttggttagcacattctcgtctttctggcatcaacttaaataccgtccccataaggagatagtctttgaacaatcaatttaaagtaatccatccatgccttttattttctttatgacacttatctcaactttgttcattttgtgtctcttccatcaaacaaaaagctcctctaaagcagaaattttcatccttcctgctctatgctgagtgcccagcccaatggcagacacagctgacactcagtaaatatttgttaaacaaaatggcaagtgtgagtgctgtagagtattatatgtttaaatattaatttcaaagatttttaagacttttgttgacttcttcaacacattctcctcccatgctataagcatctgggggctcttttccacctcttccctctcccatcacaatgtctgacacataacagatactaaacaaatatttgtggtatccatgagtgattccaattaatttgtattgggtatttcaatatagtcataagtacatctccatgtccaagtatatctccatgcccaagtatatctccatgtccgagtacatccccatgtccaaatacatctccatgtcgacatacgtgtccatgtacaagtacattcaagtacatccccatgtcccacatacacctgaggataccgaagcttagtgtggtgggcagaataatgccccttcctcatagatgtctataccctagtccctgggacctgtgcacattgccttgtatggaaaagggattttgcagatgtgactcaggtaaggatcctgaaatggggggattatcctggattgtactgttaggtacaatataatcacaagagtccccgcatgagggaagcaggaaggtcagaacctgagaagaggcagaggtcagagtgatgcagttgctccctggaggacacaagtgaaagaatgtgaacaacccctagaagtcagaaaaggcaaagaaatgaattcccccttagagattccagaaggaatgaaatcttagtgacattttgattttagcccactgaaatccattttggacttctgaccttcagagctgtagataatacatttgtggcattttaagcactaattttgtggtaatttgtcacataagcaacaggaaactcatacacttagttcctcacattgaaccctacccactctagctctctcgccatccctgttccctattagctagattccccaattcacacacctggaatctccagagagggagttctagagtgtgggactctcccaccaatctgtgtggatcatgagtaggtagatcagagatccatggaaggccatcaagaccatcagtggttggagtaggtcatgaacgtgatagggccttgagggtgagtagttactcctctcccaatttggtaaagaataaacttcttccaggaaaatcacagatattgtcatagactgcaagaagaaaaaaagcaaaaaaaaaaaaaaaaaaaaacaaaggaaggaaagaagaaggaaaggacagagagaattatgactgtgttgtgtctttctctgatacacactcctggagcttctccaagcctgtacttgccttctatgccatatgcaaatgctgtagaatgatttctttcagtgctaactttatttaattctatcatcatggtttttactttaggaaattttggttccaatagtttaagaataacatggaactgaccttagaaattgtctaatccatattgtgactggcattatgaaaaagctattattggtgaaccatggactgccctgtgggagttgggaggagaaggagggcagaggggcagagtggaagaggagaagcattcacagatgaattcaaggtctttgcataaatgtgaggtttcttaccactataattttttttaaataaaattaaagaagcaagcaagcaaacaaaacaaagagaagatggttcctgaggacaggtgttttatctaagacatgttggatgcccaggatctccttattaggacttaggatattaggccacagaaaccaaagatttgtgagggagaagttggggaccagtgtcaggtagtcaggcctttgctggtaggaagatggggcttacataccctatagccacacaggcttggcactggtcctgggtgaggagagagtggggcccaggtataggccagccaggcttccccagatgatgcgtctgtactttccagtctcactctgctcccctcaccacctctccacacaagcctcagttctcagtcactaagcagcattgagaggcaattacagggtgcagaactctgcccgggctcctggaagaaaagaatatgtgccatactgtgctaatgcaggctcttctatcatgcctctaataaatgggttcaataaataaatgggttctataaatgggtccacaagcgtatgtttgattcactatacttcatgttgtcattttcgctggctccttggggagaagtctcatgcttcagggaaaggcacgattcaccagaagccccacctcaaacttcctttttgtttttgtttttaaaaatgaactcttgtgttctcacagctccatccagcaggaatcctaaggaagctctgaggagagccacagcaccccctttctcctgcctgggtgtctcctgtccctccacaccagctccgtccgctcctttagtttggaatatttccttaacagacctgatagctctgcctccctactccctcctaagccctcatccgcaatccacatgtctgacctctccaaatagattactagttcagttggttgctggacatcttagctctcttgctatccatatgatattggacaaggagaaagacagggtttttctttgttttttgtttaaggagaaaagtgatataaatgcccctagtccttgtcaagttttatgttattatcctttcctcaaaatagagcacacatgcacacaccacatacacataccacatacatctgcacacatgtgcacataaacacccacacacgtacacaccacatacacatacacacacgacacaccacaaatacatgtgcacacatatacagaaagtttttgctgtagatatgtcattcctttagcaactattttacactttttggagtcttctctcactattagaaagagctttgcggtttacttttagagaaaaaatccacctcctcctttagcatctagtcatcagttgggagacagtttttttttttcccaattagaaggaaaaaaattccaagtctattttagaaaagaaataaatattctctttctcaaaatgcattttcagccaaaatatgccatctgggggatgttagaaatttcagtcagtttatctttataaactattgaagctgcacctgttataaatggcctctgacacaaaacattctagaaacttcgaaaacaacattgaacatgacttcttgactacagatttaaacttatttcatcatacgtgcttcacagacagtgagctataaggtgtttaattagggcacagcagtcatttaatttagcagttaaataacttcaactaagataacgggttaattttgaggagagtgataaactccactccctaggtcttgttttattggactatggggcttagcccttagcactggattggcttgggaatttatttactgatgaattcaaccaatattacaggtacttttttaaaggcagtcagctgaaagttggaggaaattctgtttcagattctaagaaaataaacaaatctgctcaccttccactctatgctaccttttctattttgagagaataaacctctaaatctttagacttttatgaagaacacttaccatcatttgaatgtctctcttcatttccagtctattctgaaagtatcttcctcccaccactaggctttagtaaatatttataacccaatcatctcaagtccattggactccatcactggtatgtttcaattatttaaagtcagaatagcatcttctgggcagctaatgacgtctcaatagatatacattatcgaaacatattgttatttacttaataaatcaagcctgttggggaaagtagatgcaattcaagtaccagaaatgaggaataatgatggcatagatcatttctgaatcactctagcccattttacagcctgtaaagtacactgaattccataaaagtgacaaatggtacaacattgtaataaatagctatagtttgtgcattgtgaattggagcttagattcatattgaaactctctgtcaaaaaagaagaagatgaattaagtattaaaatcatactctgtaaaaggaattatatattttccatttatcttgatttattatatgacatcatgtgcttaagtatatgtaacctttccaaattgagttgatttaatgtgaagggaaaaaatgttaaaaaagaaaatttggtgtatgtttagaattttctttattttcctgctatatttttataaaacttttaactgttccatggaagcttaatcatattacattttttaagttgaattcccagaaatatgcaataacatctacagggcttattaagaacaaatgtgctaaatcacaattaatatgactgtttttcattcaaatttcaacgtttgcatattaagaacacataaaactggctgggcgcagtggctcacgcctgtaatcccagtactttgggaggccaaggcgggcggatcataaggtcaagagatggagaccatcctggccaacatggtgaaaccccatctttactaaaaacacaaaaattagctggacatggtggccggcacctgtagtcctagctacttggaaggctgagacaagagaatcacttgaacctgggaggcagaggttgcagtgcactgagatggtgccactgcactccagcctggtgacagagcaagactccatctcaaaaaaaaaaaaaaaattccaaaactttcagtgaaatattagctgtatgaagagagtgactacgctgaagggtgaatctagacttccaaaatgacagaccgaggaatgggcatgccttgaatttttccaaatttcctggaatttaagtgatacatctaccgttctatttatcattgaaaaataattcttagaggaataagcacatgtaaacaatattctattgacatctgctatttactccctcaagttaacaatacagccacaaaatgattaagatgaacaaacccaactcttactgcattgcttcctaaggagatgaagtggtttttcttaggcatgtgcattggctccattttttttaaagttggtttgcagcacacttcaggaggccagaagctaaacaagcaagtgtgagcgttagcctgtaggaaagacaaaggcacaaagtgaggaaaagaaatgtgtcttggtcaccctcacctttcccggtgtccaactgacattacaccatctctctgtcctctgctcatctgcctcttgcatgttgcattcttgaagctttcctctgtcattttgctaatttctgggatggagctcgcagctcacccgctgggatagcaggagaatgggtgtgaagtatcaagggctgggttggccacaatgtcctccttcgccttccagcaatcgattcctttgtgctccattttttccaagtgtatcaaatggatccaacgctgtcctgtgcggagtaaaagaggtattctaatgatattctaatggtattcaaatgatattctaatgggaggtgtaattttatgaatacttcttgcatctcatctccacaattaaagcataaattttttggtttgaattctgtcaacagagactattcactaggccccttctctacacaaggctaagttgctatatatgtcctattttatataattatctaaccaagcagaaacgtaaatatatatcttcatttagcttatgaaggaaataatttccaagctcactaagaccatagcagaggagaaagactcaagaccatggttgtctgatggcaaagcacctactcttccccctatttcatattgattctcattaacaactaaggttatttagaaactatatattccatgatataaggtacccggcagatcacaggccttcataaaagttttaagttaataaatcaaccactgagggaaaaggttttttctctgaagtcctgggttttccactggtaccaaggtattaatagtatcttatacatagtagacataagggaaaggaaaatagaggagaaaaggaaaaaaaattggggagaaatgaggtagatgagtgaaggaagatgaatgaaaagaaagacaaaaggcaaagcagggaaggagaaagaatatctcaggaacgatttctgttccaaccattgataaactggtacaaggagtctactgctctcaggctgtggtgcactgtttgttttgtttttgaaattataatgaaagaagagagagatttaaagatcttcactcaccagaaaagttttgtctcctttcatccattaataattttatttaatttcaatcacttagagtggtgtggactaaggatgctcttattgccttcagggaacactgcagaggcctggaatgagttatataagcaatatacaagcaaatgtcaagtgtaagcctcctctaagctcagtggggcctcgtgatggaggttatagcaagaatggctgtgagcctctggttcaagaagggctaatcctggctgtgttcctgttctgccaagacaggaactctgtcactatctccttagccttagtggactagagcattagctcttgtattttcttttgcacaacagctgctgggcttctcttttaggcctcaaaatgcctggtatagtgcgtgacatgaaataagtcctcagcaaatacctattggattggattgattaagtgggaaagaatggagtaatggctttgtcttaccacattgcccacctgatctgttctttctttttgtcccaagcacttaaagcattcttattgagtcatggtgacaagctactctctggataaggcttcttgaaatggattttagtcaagcttagcaccaacggccattaggaagccaacaacacaacacatttctcctctgtacttcgcagattatttagtgaactcagccatgcttcccttggaggagtgaaaacagacatggaaactggggtgaggcacacagcgcagcatacttctgtcctggtgtggacctctgcatgaagaaatgtgatgtgctaaataaattcctatccccaggaggcttgtcttcttatctcagacctgccacctataaactacgtgacttcctggtgttataatttactcttcttgtgccacagattccttgtatttaaagtggatatttgctaagtgtctgctatgggtcaggtgcagtgctaggcacacatggacacttaactcatagaatagattcattcattcattcattcattcattcaatgtatattattaagtacctccctctgtgttccagacactattctggttactagaaatactgcaatgaacaaaacagataaaaataaaatatctttacccttatgggggtggatgtctataattcagacatatgagaaatggactctgtgttcagtagccatgaatactaaagagaaagagaaagcaggcgagggagacacaattttcaggggttcaggttcaattatcagaagcgttttttccttatctcttgtctttagatagcctgcttgggagacaattcactgagcaaaccatgccactgtcaggaagaacattctgggctcagggaccagcaagagcaaaggagctcagccatattaacgactgtgccaggatattttactacacagtgaaaaacactgtttaaaataatgaggcattatcacagaaaaagaaatgatcacatttaaaaaaataaatttgtatgtagaaataattttatatgtgcaagaaagttgcaaagagagtgcagagagttctcacatgctcctcgacatcttcttttcattagcattttgcgttatcatggtgtatttgtcaaaacggagaaaccaactaaattatgatcctgctggtttctccactaatgtcctttatctgttccaagatgtaatccataatacaaaattatatccaggaaagtccattttaaacttaggtgttaagttttatttctaattctgattgaatgctatttccgtgtaccaggtagcagttgaaaggcagttggcaaatacttgttaggccaccaagtctcccttaagtgagtcacacacagcaggaagaacaccaggcaggtggtctagagtcctgggtcttcatcccagctcttcctcaaccaaacatgtgtccttggacaagttttcctctggagctgaggcagatttcttctgtacaaaatttagaaatttaggttagatttgtaagatccctccaacctcttaaattctgccctggcattatcatggcatcagtatcttcatactcagaagcatcaaaaattatgtgactgatttccctaatgccaaacgttggttcattacagcaccagagtgggctgagagagcttcagcacaacccttgcctctgactaccatactccactccaggctccctccttcctatctcccatcctccaacagctggctccagacagtaggtgttaacggctgagatcactaaatgaataggaactattcttagtattttacttgtatttcttataaacacccttatgaggcaggtacaatttttttggcttatctatcttggtagacagaataatagccccctaaagatgaccttgttgaaatcctctgaagctgtgagtatgctgtcttacaaatctcacatctgcaaagggattttgcagatgtgatcaaagtaaggatcttttttccttagttggagattagaatatggggagattatcctggggagatagggagttattctggtgggactgatataatcataagggttgttttaagagggaggcaagaagtcagagagcagaggagaggctacattgctgattttgaagatgaagcaaggggccataagccaaggaacgtatgaggcatctagaagctggaaaaggtaaggaaacagattctttcctagagtcaccagcctgtgacataataaaattacattttttaaagctactacatttgtagtagcatattggcatattggtttctacattagtagtaatttgttacaacctcaataagaaatcaatatgcccatgaaagttaaaagaatgtgtccagagctggaaggcattatcctcagcaaactaaggtggtaacagaaaaccaaacactgcatgttttccctcagaatgggcactgaacaatgagaactcacggacacaggaacgggaacaacacacactggggcctgtgggaggtcggggactggaggaagggagaacatcaggaaaaatagctaatgcatgctgggcttaatacttaagtgatgggttgatcggtgcagcaaaccactatgacagatgcttacctatgtaacaacctgtacatcctgcacatgtaccctggaacttaaaattaaaaaaaaagagagagagagatactgtaaaaaaaaaaaaaaaaaagtgtccaaaattgggtaactggtaagtggttcagtctagatttgagcataggccatactgcttcactaatgtaatgaaaaggccttccccatagttttttttcttttattgatacacactattttatatatttatgggggcacatgtgagtgttgcatgcatagaatgtatgatgatcaagtcagggtatttggggtatctaccactatgaatatttatcatttctatatgttggtataaagttctaacttctggttactttgaaataatcaaaatacgattgctgagtatagtcactcgtgaatggaactggaggtcattatgttaagtaaaataagccaggtctataggctttttgtgatgcttgaacgaagtacacagagaatgcaatgcttagaacacacaaatatcattgagttctgtagttaccacaacaatttgtggctctagtccacgatttctcaatcctgtcacactcacccacccatcccattatcgcctcaatcccgagcctctgtcctcggatctgacctgtttgacttttgtaagacgacaatcagaattacagtgtcaaaaatgacctcatgcaattgtacagcaacttatgctattcaccttgcataagtaaacgcgatcatatttagttttgagtcaaacatccttgggaatgagttaaagaatgattcgcctttgctgtaggtgtacctatccctctctcttgctctttctgttcatttgccttctgcattctacctattcttacatgtttgtctctgtatcaccaaatctattttggtcccttcacttcagcctatttcttgtttttgtagcagtccagaacaaagctacaatttattatttaatacataaatagaatttatgtgtttttaatataaagatcagaactgtaggaggttttatattttccttaaaactccaggcaaacaagatttttgactaaattgcttttttatatatgattctgctttttctcatcttatatgttaatagtcttgggtatgaaaagtacttaaatttagagacatggtaatttagagacagaggcctggtttagatatgctgactttttaacactgagaaagtctcttagagtccctgaagatgaaagtgtagattttagttactaattcacctcttgtgcttgttatccatatgaggagctggtaagggacaaatcctgcaagagtgagaaaaagcacccatttttctatttgctctacatttgggcttaaattgctgctaagtcattccccgagggaaatctggagtgagtgcatgttacaaataaacactcccaactttgctttccacagcctcagcattttcagctccataagagacgctctgaacaagcaaatgtgcttttaacttagctctaaaatatgtcctgataggtgggagctatttttaagacaacagcaaggacccggcagactgatatttgctggaacccaaattgcctcacatcttctctgactttgcccaacaatgaggcccatcaggttattattgtcccctgagaaaatatattttgcattgcactgtatgttactgctccccttaaagatgttggacatttttaagctgcgtaatgaggaagagaaagtgggtggcaggataaagaagtgggaaaatggtaaagagtcctgcatgagaaacaaagaaatctttgcaaagtgaaacaagagcaaaagagtaagataatttaaactagagtgataaatcacactcacacacacacacacgtgtgcacgcctatcaacctatcagccatctgttaatcaattatttattaattatctatgtagccatctatgtcaactgtcaatcaatgtatcatttatttatctgtcaatctatcatctaccatgtaggaggcaggagggagaatgctatatttgaactaaagcagaataaaatagtaaaactagtctctgtgtttcttttgtcaaagagggtgaatatgccatgaaagtctaatgggggatgagaagtttgtctccttctcttctttcctctcagcagcaccccctttcccacttcaagtcctcctcaaggccaggtgctatatattgaaaacagatttaataaaaactattcaaaatattcctgagagaccaggtttgtcaccaaagacttcccaaatgataacaaatcattttgttatcatattctgaaaagcagaaaatgtggactggaagccaggaaacctggagtgtagtctgggtactatatctcactcaaagataaatgggaaagggcagttctccaacttcaatatcaccgtggggcccccaaatccaaccaacatatctagaagctgtctgactagatgttcgaatataactcaaaacaatccaacataagatcccttaggtaggagctttggcaatgtgtccacagtaggcagaatgatgggggaacttgaaattatgatatgaaaagtagatgaaggtggccgggcatggtggctcacgcctgtaatcccagcatgttgggaggccaaggcaggtggatcacgaggtcaggagatcgagaccatcctggctaatatggtgaaaccccgtctctactaaaaaaatacaaaaaaaaaaaattagccgggcgtggtggcgggcgcctgtagtcccagctactcagaaggctgaggcaggagaatgacatgaacccgggaggcggagcttgcagtgagcagagcttgcaccactgcactccagcctgggtgacagagtgagactctgtctcaaataaaaaaaaaaaaaaaaaaaaaaaagaaaagtagatgaaggaattagagatgtttatcctggaatagaaaaaattcatggatggactatataaactctgtgaaaggctgtcatgcacaggaggaatttgatttgtcctattctattgtaaactggtggttctgacacggcttccagggactcatctactggatcatagttagacccataagtaaaaatgactgctagctgtatactgcttaaataagaacagtttggggtgatacttgattttgtttggattcgtgcccccacccaaatctcatgttgaagtgtaatctccagtgctggagacggggcgtactgggaggtgatgggatcatggaggtggtgtctaatgggttagcaccatcctcctagtgctgttctcctgagagtgagtgaatgagtgagttatcgtgagatctggctgtttaaaagtgtggtgcctcctcactctctcttcctcctgctcctgccgtgtgaagtgctgggcttccctttttgccttccaccatgattgtaagtttcttgagccttcacagaagccaagccaaatcccctcatgcttcctggacagcctgtggaaccgtgagccaattcaacctctttctataaatcacccagtctcgcatatttctttatatcaatgagagaacagactaatacctttaacatacgtgtaatgccatcccctttctctcatgatatgccacttcatagagggcagacgccaccgctaaaacttatggagggaaccagaaagtggtagggtacgtctctacagaaaaatgtgctttctattgatgaaaattctgacaattaattgaattgctgtggtaggtagtaaactctgtcacttaaggtattcaagcagaggtttgaatgaactctctgtcactcaaggtattcaagcagaggttattaattaatataatacaatatttatactacatatattgtgtatatattctgtatatgtagtatataatatttatactacatatattgtgtatatattgtatatatatagtatataatacaatatttatactatatattgtgtacatattgtgtacatgtagtatataatatttatactacatatattgtgtatatattatgtatatgtagtatataatacaatatttataccacatatattgtgtatatgtagtacatatataatatatacagtatacatattgtattatattaatgaataaccactaccatccaaatctgtctctcacatacacaaacatgtatgcacaaggaagaaaataaacatcatgaaagggcagggatcctttctcattataaaaataacatcatcttttgtaaacaatttaactttcaaaagataatacagttggaagtaaccaaattgtgactctatagttaaatactttgaattgatctaataatatagaatgtaaggtgttacctagatgagtatgaaaacagaatgaagcaaactcaccaaaacatgaaataggccccccaaaataatacaacttgtttatgggaaagaaaacacattgtgaagtagacgaaaagatcgtatctatcattctataataatcaccaaaattaattcctcaaaatctcagagttggtagtggcatgaagataaataaatgcctattagaacatgaaaggttcagaaatatgagaaacatgatcagaagaggcagatctctccaccctattcaatctgtccagctcccgtgacatgtgctaaatgagaactattgtgtgagctttcagggaaaggagtaaacctacagcgaatgataaagtctccagatatttgaggttaatgaaggggaaggaggaggaaaaacaacatttgtggagaggctacatgtgccagccatcgtgataggcttttaaaatgtgatatttctcaaaactggtccatggggatgacactgttatctcttcttacagatgaagaaactgaagttgagtggtcatgctgagattcatatcacagcttttagaagcaaagcctgtgctctttctactctaccgttctcgagaatttaaagtcgtgtagaaaacacaggcgtggaacctataatatttaatggacaaacaagtgtattttactttttcatttagtctttgtttgtttgtttatttctgagacaaggtcttgctgtgttgtccgagactagagtgcaatggtgtgatcatagcccatcgcagacttcacctcctgggtctaatgatcctcccacctcagcctttcaagtagctaggactacaggcacatgccaccatgcccagctaatgtttccagtttttgtagagacagcatcttgcttatgttgtccaggctggtcttgaaatcctgaccacaagcaatattcccaccttggctttccaaaacattgtgactacaggcaagagccatcacacctggttatatttgtgtttcagaaattaagaaggtttgagaaaaaataaataaatgaaagatcttcatttggtcaagtccaaatgaagtcataacttacaggcatcttggagtgtgaacaaagagaaagcaccgatagttccacacaatcaaaaggggatttggaaagatgatcctgaaaaaaacacctgggcagggttctttataggtcactttgcagaacaagagaagtacaaggaaaagagaaagatatggtcccaagctatcaaacgacgaagcagaagataatccaaaagcaggtttctcagctcaggaaagcaagaacatgaacaatctcttcaaagggaaatagatcttgggccagctcacctagttcctgagttctagagagttttaagggctgctaggaaagctgtcttgatcttgttagggcactaccctggggagaaaacactcacatatggaagaaatgcaatagctaattcttgactaactgattgataggatgggaacaatgaagggaatgagggtgagaggcaactaatattaactaaaaagtaattgctgtcttttcatcaggagtctgctgcaaaggttgccttactgcaaacaaagtggctgaaaacagataatcctttgctaggacatctccacttttccaaaggatggaggcatcaaagaatgattactacatttgatcgtggtgaaagaggaatcatgactaataccaagagaggctcaagcagataaactgctgaaagaagtatggcattttattccaagtggatcagaaatatcctgttttatgcaatgatggggaagaaaatgaaagactcaggacatttctgggcaagggacagtggtgtcagtgagaaggggcagaccattttaccactttatattacccgcctcatgtgactagacccagtctgcaagcatcagcactgtgatccaataatctgttacaaaattcataggtttttccccctcccattcaaagttcccctgggaccccctatggaaagaaataggaagaggagagcaaaatctccctctctagcagggtcagcatccccgccctgcacagcgtcagcgccgcttgcccaccactctcctaaagacccgtcattatgaaaggaaaagagaagctaatggctgacttgatggaaacattcttggcactgtggacaggcctgcttggaggccctgtctgctgagccttgggaatgtgaagaggaaaggtagctggttaacattgtttaacacagaattaagtcataatcgcacctgaggcatattccagatctttgtccccccagcacctgtcacatttgatttaaagatttctcaaagtgaaaaatggtctccataagataaagacaactccccaatagcaaccgcaacacaaaactgctacttaccacgattttccagggaaacaaggaaaagggctagattatacagcaagcattatgtgagagaatgcaactctttttcttatacatttgaaaacattggagggaggcagtgaaagtttctccaagggctttactgggagaacatgaagtgctgggagacccaggatttccatgagtccattgggcagggcacagcgaggcaggctgcctatgtgggttatacctgctcttaagtaaggcaatggaaggtaacagaagccaagaaacaggatccataaactgaatagttctcactcctcaaagcccaactaaatagcaacagcagggagacgaaggggcttgaagaataaagatgaaaaatgcatgctccatttattagtatttgagttttcaaaagttgtatgaaaagatgggaagcaatgggacatttgatgacgctgaaaatggaaagtggggatttcatcggtaagagtgattggtgtgcaatttaggagagaaaaccgaagaagaaggaagcaaaagaaaaaaataaagacaggagacaaaagaatagctggcattagaggggaaggctgggctggcatgtcacaggatcatgttccctctatgttgagatgtgggtggctcagtctctggggattatattcataacctatatagaaaaataaggcaaagccaatcagaaagggcattaacctctggaagacgaggatgtggatgaactatatgctattattgtttggaagtaatgcatttgcacttcaactttaatgacagaggatgacaaaaattagaaaggtagtttctagtcttttccactatagtaaaggactgatttcttatagggaagtaatttctcctgacacattatattaggtaaagattgcatcttatatgaattaatacatttaaaaacaaagagaactattcacctttttttgatttgtttcagtttaaggggctaaaatctgttaatccgctactatgtgctgtctcctttggttattttatttgctcttaaccacaaatttggggtggtagtcttctgagattggtggaaaactcatgattttctcaaagtcatggtgttcatacaaacactcagaaatcaccctcattgggttcagggaaaggtaggcaatgtttcattccaagcctggccactggctgattatcatccccaccccctccacttattctgcctccagacaataaacttaaaggtgaaggcagggaaaggggaatgaagagttcaggaatatcagagatgcgtgatgaaataataacagatgaactggtgattatgatatcaaaagcaccactacaattgttcaggatgtaaaagaactaggataaagtaaaacttctttatcaacaaactgctggttacccccaatgtagagttataaaaaggaagagatggcagtgccaagatggtggtggtgggatatcaaagtcctaacagtaaataaatggcacattcagtgagcttaaattaagagagttatactgaatggactgtttacaaacatgtgggaagagttagaggataattaaacatccagggaccagtaatagtgagaaatccaatttttcaaggggcagagatattaaaaagtgattatcacatttgtttgtgtcactacctgtggtcttgaagagggaagaggagggaatcgtagtactggaatttaatgagagctattgcaccaggagaaaggtggctggaaaggagctacattcttagagggacacagtgaaaatctgtgcctggcaagaaggaagcctggggatggggtgaacaaatacccctatctctctgtctctctttgatccaaccttgtggttttcttacagggggacaagggactttgagtaaacagcccacagaaatcaccctctttgggtacaggacaaggtagggaagagtggagaaaaagtctggagtggcaagcaaacaaacaaacaaacaaaaactagcccacaggactgtgactgagctaattagcacaccactccttccaggccaccctacagaagccaacactaaacaaaaacacagcatctgctctgcaagacagactcaagatatgttctttggcatgtctttccaacaaaattactgcctctgggtcatcctgtgtagaaattctggagctaccaatgaattgggaagagtgttttttttttgtttgttttttgttttttcatagaaggatgagtaaagaaatttcacttgttttagacaagaggaaggcaagaagacatagttaatgggtacggcatggtaaaaggagtacagaaattaagaagagcaggcaaatagatgtgatggagaaaaatatatggtatgttatcaagaggaaagagacagagaacaacgaatcatgatttgggaataaagttggcaggactgcagaatggtgatatgtatgttttctccctcatctgtgcagcagctttcaacactgaattaggaaaaaatgtggatggtgatgtatattactttatttacacctcacagcaaccttgcgagataggttatccccatcttataaatagggaagttaagtaatttgtcaaagagcacacacttggtgatagggaaagccaggaaccaacctcgcttttgtttgtttgtttgtttgcgagttcccttgccaacaggccttcctgtagagaacattgggaggacatataaattgaaagcagagtggaggtggccagtatcacatacctgggacccaccggactcatgggcttccaataagagtaaccagaggggtccatagaaagtcagagctgctgccattgatgacgaggccggagggctcttttttgccatactttcttaaagcaccatggccctatgctcttaaacatgtctctatttttttttaaagtaacaggcatgacagcaactgtattggtttactagagttgctgtaaaccacactctgggtggcttatacaacagaaatttgttctctcacggttctggaggctgcaagtttgagatcaaggtgttagccaggttggtttcttctgagggctgtgagaaggagcctgttccatgcctgttccctagctgctggtggtttgctggcaatctttggaagaagcatcaccctgatctcttgcctttattatcacgtgacattcttcctgtaagcctccctctgttcccaaatgtcccccttatgaggacactagtcatgttggattaagacctaacttaatgacctcattttaactaattgtattagtaacaactctaattccaggtgaaattacattctaagatactgcaggttgaacttcaaaatataaattttggggggatataattcaacctataatcgcaacctataaatttgtcaacaagttctaagataaattggcaaaaaacataatagatctacggtagataacacaaaggaaaaccatggacatttagaacactgctaagaactatgataaccagtatctgtacaaatgtaattggctctggtgttgaagaatcaattatacaaatgtatgtaatgcacaagtatattttatcataacctctgagaataaaatgaaataccatatgtgacagcactttacaagctgtgtggtattcaaattaaggcattagttttattgctattaccatgtctttatttatataggtagcttatttttattgttacattgggcatttcacatttttatggtccatttctttttatttcagttacatcctagattaatatcatctatgtctatttcttcttaggaaactgagtttctccattcctttttttccttgatcattagaaaacatctttcccaactcccatttaaatgcaaaatggagtcctggcactgggttgctcaaatagccaactccatctaaacttagctcacgacagaaggaacttaaactgtcagcaaaatcagcacactgactgcaaaccagttctcatagagatcaattataaattgagacggtgttctggatgctttagtcagatttggctggtaccccaatgatctctgactctatttcttcagatactagtatgaattttcatcttcaattataacctgctaccaggatggcatatacctgatcctcttctatttattatttattttgcagaaaataaaaataggaaaaaaaccctatgtttgtacttttacatttaactcaaaactcaaatattagtgaattcctttgatttatgtgaaaattaaagttggatctaacataggcatccagcctcctttttttgacctttcgtcatactctctttgctactctcaaatttggtcaccccacactggagactggtaatttgcaagttaattcattcatccagaatttattgagcacccatcatttatcttgtactcagctagcagctatagaggagataaggctagttgtaagtatgggatttggtgaatttaatgttattgttttgattaatgactgggcccactggtttccgatatgcagtactttgcaattttgaggggcactgacttgacatatgcgctgggctttgagtgggagccctttataagtgagggagtggagtgaactgctcagcgcccacagctcagtggcttgattgttttccacttgccacagccttggctctcctcaatttttaattttctgaattttatagggggaaataatgtactgtaatggtaatcatggaaagccttaaagtgtgtctccaaaaatactgaaactctcttctcctgtataaaataaaaaaggtttgcaatctagattcagagtttagaaataagtaccttgacattttcagcccctaagagaaccttttaccccctaaactttctgtagaatttataacctataaccaacaaaacaccaagttatttctcaagcagctatgcagaagctcttctatttggaaagggaattaacaaaatcagtataagacttgggagctttctgcaaggagtttataaatctcgtcggagagaagggacaggtttctttttatagcatcaacacaagtcaggaaagcaggaaatgataagccatgttatttgttccggagtctttaaacccagactctacatctaatcaccatcataaaaatgccttttttttacctccagctttatagagaggagcctcagagtgggccatcctggaggagtgcacctatcagttgagaaatagggatgacaaggatgtaggcagctgttgcattctaaaatgtgaatttgttttgtgaaagcctttcattaacaaaattatgtgccgagaaagggcaatgacaaaactgaccaaattccttcccttgtaggtcagataacatttaagagctttacatgtctaacaaacttgaggttgctcaaactggacaaaggaggagattaaaacactttctgtgatgacataaagcagtgctacgggtaaggcctcagtctcctgccagcagaagcaaatgtattttctccatttaaaagagttgccttcttaacccacacttccccaggcattcggtcctgatagggcttggtttgactgattaattgtaattctgctccatacaaggtagacagtgatgaattgatacattaaagatgtgattaatggttactttctattcagtgtaattatcaggtgatagtttcaatgaaaaatgctggaaaatgaaacttttcactctagataactatccaccctgtctggaaagaaaaatggttctctattttcaacattttactctagatcaaggccaagagagacagagagacacagcacactggctttgtgagttttatagaatgagacggatttggaataatgcctgtctttaaagaaattcttagagaggaaatctctggataataaactttaaattttatgctaatcctggattactttgccagctcctgcctggtctttctggtcaattctggcatttaatctatcctgaagatggttttggattaatttccctaaagcaccgcattaatcatatcacatctgttttttttttttttttcggagacctccaacaacttcccacttaaattataggaagaacaaaacatcaacatgaccctcaagaccctttgataaaaggcaaacactctttgtcaaactgtttcaattcctgtgcgctgttctttcgaggctgtcagctcactgccatctcagctggccatgatcccccgaggccatgctttgctttgcctctttttctacatgtttttagctggtagaaaaaattgtggacgacttaaaaagggaccaaaagattaccaggtttccttaatggagaaattttgtgctgtttagaatgcatcctctgattcatctgattctgtagggttttggcatttcattgttttggaactattatataattttgtggagttagaagttaacttgcagaaaattcatagaaatataaaacatcattttctttttttcttctctttttttttttttttttttttttttttgagacagtctctctctgtcgcccaggctggatggagtgcagtggcgcatcttggctcactgcaagctccacctcctgggttcacgccattctcctgcctcagcctcccgagtagctgggactacaggtgcccaccaccacgcctggctaactttttgtatttttagtagagatggagtgtcaccgtgttagccaggatggtctcgacctcctgacctggtgatcagcccacctcggcctcccaaagtgctgagattacaggcatgagccaccacgcccagccaaaatataaaacattattttctatatacatgcagataggttctgtccaatggagattcaatggacttttctaacctgctgtggaagaagccaggtttttctgtgttaagcaaattcatgttggcatttttgttggccttttatagttactctttgggatctcctttgaacttaggacatgttaattcccatcttcctaactaatgagctaaataaaatctttgacatgtacattttatatctgtgtaaactcatactcatgatttacttattttaaaaatgatcctttaatataatctacccaatttaaaacttagacaagtttttagagcagttttaggtttacagaaaaactgaatggggcacacagggagtatgcatatatctgccacatcctttcccagttttccttgttaacaacatactgtaccacaccagagaggtacacttattccaattgatgaacctgtattgacacatcattatcgtccaaactacatagtgtacttcaggtttcactcttggtattgtacattctatgggtttggataaatatatagtgacatgtatccacccttctgtctcctacagaatagtttcactgtcttaaaaatcctctgcactctgcctatttatccctccttaccctcaacccctgacaaccactgatctttttatgtctccatagttttgccttttccagaatgtcatatagttggaatcatatgattggcttctttcacttagaaatatgcatttcagtttcctccatgtcctttcatgtattgatagctcatttctttacagtgctgaataatattccattgtctaggtgcgccataatttattctttcacctactgaaggatatgttggttgcttccaagtttgggaaattatgaataaagctgctataaatatcagtgtgcaggtttttgaacagatatatgttttgaactcattttgtaaatgccaaggaactggatggctgaatcatatggtaagagtatgtttaattttataagaaactgtcaaactgtctttcaaagtggctgtgccattctgtattaccatcaccaatggacaataactcctgttgttcaacatcttcaccagaatttggtgttgtcagtgatctggattttggccattctagtgcgtatgtagtagtatctcattttgcttttatttgtatttcgttgatgacgtatgatgtagagcctgttttcatatgcttatttgccatctggatgtctcctttgatgaagtgtctattcagatctcatgcctatttttttaatcaggttgttcattttcttactggtggactttgatatctaaccaattaaaaatttgaactcaacttggctgtacattagaatcatctatagagctttcaaataatacaggtttgacttgtgtacgtccttattactccagtaagtcacatatcactggagggatggtgatggcatacatagctaagtcccatgcagagaacttctgatttgttggggcctgggaatctgcatttctaacaagttcccaggtaacaggaagcactttgagaacacttgctctgcttagtatggattactagtagtacagtttgttaggctctcttctttctctatattagcctgttttaaatttaattgtatgtcccatattttgtttacaattagctatctaagtatatgtgcttttgtaatcatagcttggaattgcgttttctaggttagttttcaaaataatgcttatattctgctaagtccctgccttgtatttttgttaacagactgacagaaattggtgcctggcctatggcctagtggtcttcagaaatgttcttccaaaagctttttaactaagaagacaaaacaccatttctactcaacttagctattatccttttaaataaaactttttgtaaaaatatcccaacacaaacaataagattaaacaaaggatcatagatttctccctaggattatactctctattaagcacagaattgaatatatgtataatcagattttaaaatgagtttgggtctgcctaacctaaaatgtagatgagtctgcctctttctaaaattttaaatcatagtttcttgcagagaaatctggggatgtttaactgaaactttgactttttaaatttgaattttctgaggttgcagttgataatatttaaggtgaatttatttggctataactgaatctttgcactaaaagagagaaatacctgctattttaaataaatccaaaacaacatatctgcaaagctgaataaagtctattttctctcatataagataacgtatttcaaagatgatgagatacggagtaacctcttgatagcatttggttccctcctcattgatgttccactgttatgaatccttgcttaatataatgctcattctccttctaggcttttcttttatctcactataaaatatttttgaagcaaaagtccttctggagtgaacacacacatgtatgttaagactttaaggtatttacctgttaagaaatatttttttaaaaaagaacaaacagaaagcaaaaagagaatcacgaaagattcaaatgaatatttcttattcatttcgaaaagcatgaaatttctatcttagcattcatagatagtattctgagcatgcattttacccttttgcgtgttactttaattttgctttgagacaaaagctgaaaaagaagtatagtatatgtgtgcatgtatgtgtagtttcttctctttttgtagttagtgaaaagaatttacagataatggtatatcagttaaaaccaagcttaaatgtagtgatcactgaggggcaaatttctgctttgcttagagttgttaacaacctcaggtcacctgttacatacctttatttatttgtttatttatttattattattatactttaagttttagggtacatgtgcacaatgtgcaggttagttacatatgtatacatgtgccatgttggtgtgctgcacccattaactcgtcatttagcattaggtatatctcctaatgctatccctcccccctccccccaccccacaacaggccccagagtgtgatgttccccttcctgtgtccatgtgttctcatttttcatttcccacctatgagtgagaacctgcagtgtttggttatttgcctttttttaaattgagaaatcaattatgaatatttacaacactaggcagccaatgactcagataaactgcatttgaacttgtcgtggcctgacaaatgcaggctttagactttattgttagatattaagaatggttcacttttatgagtgaaaaatgtgaaccatcaggaaaccagaaatagtctaggctagaaccttagcaccaccatgaagacttgaacattatgtgaaggggaaagtttggatctcaaagtggattgagctagaagcccatcaggatccaggttcagcatctgggctgtgaagaaaaattatcagacttagaacattaactgagaaagcttgtgttagctttttatttttgcataacaaattaccacacacttaactttaaaacaatgagcgtttattagttcatagtgccgcaggttagaattttatcactgcatagctgggttctctcttcagcgtatcatgaggctggaatgagaatatcatatgacctacactctcctttggagactctagggaagagaccgcttccaagctctttcagattgttgacaaaatctagtttcttgtggttgtaggactgaggttgccagttccttactgactctcagcttctagagactgcctgcattctatgccatgtgcctccagcgcatttccctctcgttgactctctcattcttctactcgctttgattgacttatctgtgattgccagattcagacttgaagggctcatgtgattagtccagctccacccagatagtctctcatttttaaggtcaactgacttggacttttaatatcatttgcaaatccctttccagcgacacctagataagtttaattgaatagttgggagtaggcagtacatcaggggccagggactctggagccatctttgaattctgcctatcactgagctacaagttcaaactcaactgggcagcaagctgtcgagctggcagacacccagatcaaggaagcattgctgcagagtggacatccgatggacagtggaatcttcaatatttcaacagctacacagtgtcccattagaaatgatggtggcgattaccaccagaattggattttctctcaacttgatgtccctagaaggtctgaatatttttggacggagtatgacaccaacatgtgggagcaatttcaggttggtaaagcctcaagaagggatagagagtttcctgacaaaaggacacatagaaaattgagaatgatgtgactttgtattacaaatacacagaggaattcataacatataaacattgttttatggcccagtatgatggctcacacctgtaatcccagccctttgggaagctgaggtgagcagattgcttgggctcaggagttcgagacgagcctgggcaatgtggtgaaactccatctctataataaatacaaaattaattagctgggtatcatggtgagcacctgtagtcccagctacttagtaggctgagatggaggatcacttgagcctggggaggtcgaggctccagtgagctgggatcacaccactgcattccagcctgggtaacagagaaagaccctgtctcaaaaacaagcaagcaagcgaacaacaacaacaaaatacccacattgttttattaacttgctataagctcttgccccacatcaacccttgatatttgccatataatatgggagacatatgattaacagcagagtggggttcagcatccctgcgtcacgtcttactcactgcatgatgtgggcaaattaatcctaaaccttagttttcttttctataaattgggaaataaactagtaccagcacataaattatgaatagtaaataaaatacaacatgtaaaaggcttacagcagactttagttaagtacttgataaatagtcactatgttgagattaagttgtctggttcctaaagttaccaagccattgctatggtttgtatacggtttgtttggccccactgagtctcaggttgaaactggattcccagtgttggaggtggggcctggtgagaggtgtttgggtcatgggatggatccttcatgaatggcttggagttctcttcaaggtaatcagtgagttcttgctctcttagttcccatgagagttcccaaagaactgattgttaaaaagagcttggcatctgccccatctctctttcttctctcttgccatgtgatctccacgtactggctcccctttgccttccaccatgagcagaaggagactgaagccttctccagaagcagatgctggtaaccatgcttcttgtatggcctgcaaaaccataagtcaaacctcttttctttataaattatacagcctaggccgggtgcagtggcttatgcctgtaatcccagcactttgggaggccgaggcgggcagatcacgaggtcaggagttcgagcccagcctagccaacatggagaaaccccatctctactaaaaatacaaaaaaaaaattagccgggcatggtggcgcgtgcctgtaatcccagctacttgggaggctgaggcaggaaaatcgcttgaacccaggaggcggaggttgcagtgggccaagatcgcgccattgcactccagcctgggcaataggagtgaaactccatctcaaaaaaaaaaaaaaaaaaaatacacacacacgcatgcacacacacacagacacacacagcctcagttattcctttatagcaacacaaaatggactaaggtagccatgtaggtctttgatcatttttaaactgattttttttttcatagaataggatctacgttgagtcattcatttactgtccatttgttcattcagttatctaagtcatatttatcaagctgcagacaaagcaactgagatgccaatttaaatgagaaacaaatccctggagcttgtggtgcttacagcctagagattctaaaggggatcattcgcactctcactccacttcattctcactgagattccaagaaaaacttaaagggaacataatggcagttttaaaatagagcaataaagcaattttctcacattccctcaaacactgtaaactcttgcaatttagagacataattttacacatttttgattctacctaaagttagcatggtgggagcacatagtacattgatttaaactaaaaatactagaaacaggtattgtctttaggagaatgagcaataatatttgtgaggaccagtgtctaacgattaggcatcatcttaaacaagaaacatattgatttattacatgaaggttacaggcctaacacaaaagtcaaaatgaagcaacatttactgcaatctatgcttttaagtaatgcctctcaacaaggtcccaggtgttttagaagctgcgctattttagcacaaaataatatactgctgacttttcctcattgcttttgaaacaatatggatctacttttgtctcatttacagaacaaataaaaaagccctagattcagtgagtcagtaaataagacccatttttaagagaaagctgagatcctcagaaaataattggagagaatgacaggggtttatatacaaaggcgtaactcatgacatcattagtatttgtagaaaattacaacttaactacatcactagcaaaaaagaagtggttaagtaaattaccaaatagtcacaaaagtgccatattaggcaacatttacgaatgttcatgaagaaattttattggcataaggagaggcttagggcaacgttaaatgaaaataaaagcagactttggtcctatagcattgcaggatgactatagttaacaataatgtattatataatttcaaatagctagaaagaagatattgaatattcccaacacaaataaatgataaatatttgaggtggtgagtatgctacttaccctgatctggtcactatatgttatatgtatgacatcactatgtataccataaatatgtacaatgtcatttaaaaaatttaaaaagagttgaaaatacacataatatttgcaattatcataatcatatttaatttttttcctatataaaggggctactggttattccatttcagccgaacatcactttagaaaaacagttggtgcagtggttgagtgcaaattgaaggatgtagtaaaggtctccataaccatctggctgagaacagaaatgatttagttacggatttttgttgtatgttactgattggcactcagcatccaaccccatctctttcagttgcgttctatagaagtaggaaacctaaaactcatgtatctgattctctctggaaactatggcactagatgttagattctacaagttagatatacaattatgctgtccggtagaaaggcaaaggtttttttgggggggggggtaggggacgtactgtttataaaaactggaaataaacaagattttattgtagcaccttactagtgagcatcctgtacattttgtgagtgttgaaggcaggggaagtttcttgaaccgggcattccacctcagtctaaaaccaagtgatggcttgaagcaaaggaaaaagcccctcaagtaggtcagttttataaagttctgggagtaattcctggaggcccagcctgtggagtgttcctcctgtaccccagtgaggctgtaggcacttgctgctcggtgttaacccccttcctgctgaaaatatcacgtggtttctcttttctatcctaaaccaaatgaagacaaacagatataacgtgaattctgctattacagggaatattgtacacctttctgtaatgtcattgattatgtttttgtcatgcatgtgttttgagctccttttccataaaaaagtgctcatggtaagcatatacaagaatacacattagtggatacgaggagtgagtagaaagcatgcttgagggtggttataagtgtgtctgctacagactctaaaaaccatttcaaatattttcttaagtcagcactaactatacataccaagataatacattgaataattatcttctggttaccaaatttttcattcaaaaattaataaaggagaaataggtatatattctggaacattattaccttaaccagatactgtctctttctcttttcccaaaactatgtattgttctctagttaccctggccaagatgagaaaaactccaacctcttggtggttgcagaggccctccatgcctaaatattaatagttggaaatacagtctttgtttttactcaagccagcaagcatttatcaagtatatctactggggataaaatagatgctggagatctaatgatgattcagatatgaccctaattctttaaaaaaaactttcactatcttgtgaaagacacataccatgtagtagtgtactggtaaatgtttatcaaccagttttctaagaaaaaaatgtatgtgcatatatatgtgcatatgtttattataaatattattataaataattgcagcacaatttacaaacacaaataaaaatagaatcctccttattgtaagttttatataatgaattgctcctcaaagtatgctttcatcaattttactgaaatcttatatctgtagccaactgatggttgcaattgaggaatgagtgtagtctaaaaatgaatgatagtttatgtttttgtgtatgttaacactatgctaacaagtaagatgaaagggaagcaattaatatgaatcagatcttcactcattcatcaatgacatgagcaattgcttttcttaattgggtaataatttctaaatactgcaaagcattttctggattttttgtgttattcacaatgtaacagctaaaggcacaatacatgttaagtttaatgtgaagtgttaacattttctcaatcactttcttaagtctatactaacaatataacagtaatcaagttctgctttgtaatgtttgtcagtttcaatggtataaatactcccatcatgaacaattgcaagctgctaatggaatgatactgaataaggagttggaaagagaggcatagtacagtacctcattattttagtattcccaccacacaaataaaatagaaacaagtaacttcaaaggcatatataatagtaaaatgtaataagctaattagggagtaaggagttttgagcatttattaaatttatctttaatacaatttaactgtaatttcatagagtttacttttaaataatggctgtatttaacaattagcttttgaaattcactaaaatgtaaggagtggctcttgtgagcctataagggccatctctagcacaacactggatatgtgattggtgataaaggtggaatgaagcatgaggaaaaaatagtcgtctgtatttggggaaaatcaggaaataaatcctgaataggagccagccaggcaacactgggaggtgtagtgaggggacatcccatgcagagcagggagaagggttagtggcagaaggtatcacagcccacttaaaaccttccctcatctcttagcattcgaatggggtaaggtctgcagaagccagattgacaatgaaccttctaggtcaaactgaggtgtgagactttcatcttgtttgagactaaaagccttgcagaagttgtaaaagcaagataatgcatttgcatatggaagcaatgactctagcagtagtatggagcacagacagtagtaaagctgagtcatggatgaggaggcagactggtcctcaacgctgatgttgtcctcatcattgtctttggtcagcatctttgtgctttctctttactgtctttttctaatttgatcctcccattagcaaaggtcaaatcccaaataagtgagagtttttccacccagccatccagatttagaaggctcagaatgtacccaacctcttcctattttttttttttttttttgagatggagtcttgctctgtcacccaggctggagagcagtggtgcaatcttggctcactgcaacctctgccttcctggttcaagtgattctcctgccttagcctcctgagtacctgggattacaggtgtgtgccaacacgtctggctaatttttgtatttttagtagagacagggtttcaccatgttggtcaggctggtctcgaactcctgacctcatgatctgcccaccttggcctcccaaagtgctacaggggtgagccactgcacctggccaacctcttcctattctatgttgactttatacagctacatccaaagtgaagttgttaaccaaaacatcattacagttacaaatttaggaagaaaaatcaaataatatttgatgttattaggaaaagtgatactagagacttgaaacatactaccctcaatgacaatagtgatgcatgcagacagtgttgagaaacttagagagtcgatggaaaatttagtttattttaatttaggctgtatgtagctcaaacatatgctgagcttttataattaaatggagtttctttcgaaagtgtgacagctctttgctttctttctacaagattgaaattagagttggaggacttgtgacttctgaggacagagaagaatgtaagcagcagaaagtttctgggaaactttctagattatgatttgaggcgattatttcactgcctataccccagacacctgctacttcctgtttgatggtaaacttttcccttcagtttttataaagagatatggcatctgggacaattgcttggtcacatgaatttatttgagggaggtcagcatttctagacaactttgatatttaggtgatggaatgaaagtcaaaaaaaccagcattgagattttaatttgaaaatactgagttaagtctttagtgttaatagagctatgtttcccagttttgggatttcatgaggaatatgcttgtagagctgaggaatgatgcaggcattatgaacagaattgaaacaaaccatataaaaaaagctctcatcaaaagaaaggaaaatagcaacaaaacaaaataaataactcttccccctgaaaaaaaaaccctcaaaacgcttgaaaacatgttcatgctgaaaaataatcaaatacattgaaattaaaacaacaatgagatattcttatatatattctaatgagtatatcaaattgaaggttcacaaaaatatatactctcatctactacttttatggtgaacacttttaccatataccttaaatgtttatgtgtcttgaaggtacaccagtctctagaattcatgttcataactggtatataatactgcctctttctgtaaaccgctatgtgttgttggtctttttgtgattggtttatttagaatttcatttgtgttctacaacctatattagatcttaatctcttccagataatacaaaacaaaacaaaaaaatgctttttctctcatgtttcttttagtaatgagacttttatcaacagttaaacatttattcaccccaacttcattccccaaaccactggaggcagcctaccgcaaaatcaaataagtttaaaaggacagtaaaaggacgaaagtttaggaacaagaaaaaaatgaatcataagaagaaggctgcagcatgagaagaaaattagaacggtaatatagaaactgtaaggaactctaccaatggaacagcagagccacgcaattaatagactgggcttggaagtcaaagggaaggagccttgaccagctccactgcttttattcactgagtgctaagagcagctttgcataggatgctccacgaagagctgtgaaataagatgtagacctgaggactgccatagggtcccttgaggtaaatgcactaacgcgtgtctctgaagctgatttcctcactttagaacttctaaatccccgcaaatctccctccaaatttcattctgtctctactttctaatattcatcgcagtcggtcttttaaaaatattttttaaattttattttatttttaattgacaaataataattgtatctatttatggggatacaatgtgatgttgtgatagatgtagggttcacatccattgtcttttgctgtagcctagcaaacgggtctagctttccagcaccagagccagaggaagccttgctttgtgtgggggattggcggggagaagtgaagaaagcaatggggatgcatttggtctcctctccaagctcccttccttccttactttatagcatgcccacttgcaacaagaatcagcctaggacacccaaagtgcctttgcctcactgctgtttgctgcggttgtgatctttctcactggagttgtgaaaaagcagaaagtgagtcctcaatgtgtcaggcctgctgagctactgtgatggttaatactgagtgtcaacttgattggattgaaggatacaaagtattgatcctgggtgtgtctatgagggcgttgtcaaaggagattaacatttgagtcagtgggctgggaaaggcagacccacccttaactgggtgggcaccatctaatcagctgccaaggaatataaagcaggcagaaaaatgtgaaaaggggagactgttctagcctcccagcatacatctttctcctgtgctagagaattcctgccctagaacatcagactccaagtttttcagttttgagactcggactggctctccttgctccttaagcttgcagacagcctattgtgggatcttgtgatcatgtaagttaatacttaataaactcccttttacatatatatatatatgtgtatatataaactcccttttacatatatgtgaatacatatatgtaaaagggagcttatatgtgaacacatacatatgtaaaagggagtttattatatattatatatacatatatattatatatacacacacatatatgtgtaaaaggaagtatatattatatatacatatattatgtatacatatatacatatatatctcatatatatacatatatatctcatatatatttatatgcacatatatatatcctcttggggagaggtcaaaagaagcaggggatacaaatctgactgcaaaaagattgaaggacagtctttattgaaagcctttggtggggatacagaggagtgaattatattgagagataactcagctgaattttctataaattcattgttgctatcttccattttcctaaccacctgctgacttaacctgggttctttctccatttgctctctgactctgcttacctttcctgtctctgtggtgcttctcggtctttctctcatgttccttccattagtctgtctgactgtctctctctgtctcccccagcccccactggatcttcctgcatgttctctccttccagattattctctcttggtgtttgttctatgctttcttgtaaaaaaacatgttggcctctctgggcttttgtaattaatacatctggtcataggggaaaagaatgcttctaaatgttatttgtttttccctgacatgtatcaaattttagttttcactctacctaaagtcccgtctccagtttgaattcaccactcttgctggtggttagataagcaagcaacagacaacgtacacacagaccacatattgagaaacaagggagcctatttgaaattgcagaaattaaaacaacaacaaaaaaaagatgcataaggagctttctgaggagtacatcgcctacccaccaccccacttcaactggaaatctgtttccagtcagcagaaaactgaccaaagacccatcatcaattatactttgtgaggatggttgtctctgaaatatgcagagtggcccagaaattgtagaaaagaagggttgggaaggtccatgcctataaagccaacaagacactttctgcacctcaagaaaagtagtctcgctgttattgtattctgtctgatcaattttccttattttaatgacacatagttttcatgttttgtaatatttttgtcatcacacatggtaaaaagccaacccatatagtctgaggtggaggatgggaaagcataagacattcatacagtgacccttcaaacagtcacagatgacatggttcctggacagtggggcatatctcccagatgaatttcaatgaaagcaattctatagagagcagagaccattgtggcctaaacaaagagcttttcagtgacccaggaagagccaagtatactacttcaggcacctggagcaatggatgacctgaatgtcctcaacacaatcctggatcattatctttactttcaaccagattttgataagaggagatgtagtcagtgatttgtaatcccacagtggtttgccaatggttgctattagcaggaaatcaattcagagatgtcatttgaggatgaagctcctcggtattttgatgcctttttaggaagctaagaggagctccactaccagctcttcagaaaaaatctcctgagttgcctaatttcacctgaatttttggagcacacatttaaaaattacttgtgaatcaaattcaatttgaaaatatgcaactttttttagctcttgctttctccctgagctatttcttgaaaattgtggaggaattgcttctgctcattgggcccatttacatgaattatttatttttatatgtattacatatttgtctctcctccctcctacaagctgttccatagcaagacctctcgtccctatatatattcatggtgacattacagccatcttcaccctctgatgtctaaaggaaatggaaattctgagggtcttcgaaaagcaaaaagccaggtttcctttattctagatttctagaggatttcatagccactaaatctgtaataaccagaagtaacatacatgcatgtacctgggaagttcagtgataagataaatgcatagatgtctttacccatgagtatataatgcatcattttaactatatttttccatttttcggtgttcactttgtagtcatacaaatactagccattgctcattgagtactgtatgtcaggaactatgctatgcatttgtgtaaatcatcacatctctttccagttatcctgcatagtattgttactccatttttttttcctaatgataaaactgaggcagagagaagtaaagtaactttcccaaagttacaaaatcagtaagtcatgatttggtacaaatatgccaaactaccaatctgggccttttaactccactctgctgttgttacattatccttctcttgcacatttaagccatattatttcaatgaaattctgcaaatacttattgagcacttgttatatgtagccattgtcctagttactggggtcacagaatgaaaaagtggagccaaattataaggaggttagattctagtagacaagtcagaaagatgaacagatgaatgtcctacagggcagtacaggtataataagtgtttaccacttaactaaaggtggctcagatcagagaaagacttagtacattatggtgcttcaggatgctcactggtggccaggcagaaaagagtaaagacaatggcattccagcaaaagagagaggcatgggcagtgtcacctactggtgaaataatgcagacaaaaaaccaagaagagtaatttggtactgttgggccataacagatacataggggaatggtgggaataaggatagaaagtgactggggacagacaataaacataattcagtcttacaagtttggatttttccatgtaagttacaaagacccattcaaggaattttaagcagagaaataatcagaacaagtcatgctcagagtaaatataggacatcaaattgtttatcaagaaaaacagtgttttttattatactttgtgttttactggcaatgacatattcagtagatctctttttatctcagttgatattagacattagaaatgaaggctgcggctatattttaaaatggtaaagatcttccatctgtctagataaaattttgttcaacgtttcagtcacttaggtgatggaaatttggctctcctccatgaatcccactttccttgactccttcctactacaatgtcaattctcctgccctttcaaggtagagaaaagtgtttgtagtctcaaagataccagatggtatctttgcctccttttgaaattcatggcacttatgttattccacttttccactcaatgtctttgtcacttgcctatatcctagttgctaccagtgtcacagaaaactctgaaacttgatccttgattctcctttccatttcaactcccaccatcatttttgaccacaccaatatctttgtatgcagtacaataatctgggagtttgtagaaggaaaatggtacttttgactttggggattaagagaagttttaagggagacatgttctgttgctctgctcttccaaaggtaaatgaaactggaattattaaaaattgggagcagaggccacatttcctagttggaagaaacagcacaagcaatggcataatatgaaaagggtggcaggaaagcacataatcctgtgtgattgcatcatagaggatataaaaaggggcaatatgatacagggctaaagtggctaacttgttctacattttagagaaacttgttttaatatcaagagaaggagactgaatttcatttggctggcagtggtggcagggaggtggagatttttgagaaatgtaatgatcaaactgtgccttaagaaggtgaatgaataattttttaggttgggaaagaggatggagagagggagaagatagagtgcaaactgctgctaactattttgcttgttgtccaaagtgtgtctaagatcatctaggcagaggtagcaggaagtagaaggagcacagtgtctataactgcgtttcaaagaatgccaacacttaataactgaataagcttgggttggtattcaagtgaacttgaggaggagtgcctgacaggaaggagggaaaccagggaaatacttggcagtggcaagtagagagaatatgctctaggtcagaagcaccaatagtgttaaaatgaaaacaagaggtcaaataagatgtgaactggacagtaaatattagttataataacatggagatcattgatggtcttagctggttattagatcatttgttagcttcattgggggcagaatctgggagaatttggtagaaggaagtgctgcaaagtgggagactcttgagggaaatttttaaataaacactgttggtataattaggaggggcagatatacattcaaatcctgcttctcaattaattttatgtgtggcctgacttctcgaaatcttagtttcctcccggtggataagagaatggaagccaatgggtcattatgtagaataaatgagatcataagtcaataattggatgaaaagagttctgcgtttgcttgacctaagtattcaataatggtggcaattactatattatttgaatctggacaattgttacatattggaggaggaggttacaggtgtatacataacttgttagttatgttttgactgagaataaaactgttatcaagaaaaacgaggaagtcaaaaagataatctaaagaagagaatgaagtaggtttgtaattttttcccttttaaaaatatgcatgcaatgaaatgtgcagatattttacatttctgtgggttttgacaaaagcttatacacatttaattcacaacctttgaggctatattctatttctattactttaaaaagtgccttcattttcctttgcaggtcactcattctaccaccacctgtgggggcaactactgtttatttctataaccatagattagttttttctactctaggttttttggagtgatatagtacatacttgtttgtttctggcttgtttgaatatactactttttaaatttatccctgtggtttggggcactgatcgtttgccctttttttcattgctgggtttaaatatactaagtataccatattttttttgtttgttttaaaatctatccacttgtttatggacatttttgttgtttctagttttgcgctattttgaataaaatttctgtgaacgtacaccttgtataagtttcactgtataagaaatcatcacatgcccaagccatgtagatagttccttatgtattattttgttttcccaataaactttatagtcagcttttatgtttagagcgggtattcatatagatttaattattgtttgtggctagaattcagtgtagttcatgatttttttctatattaatattaacatgtttcagtgtaatatttgaagtatttttctttctccattgaattgcttcaaatatttttataaatttgtcttttgtttttagaaatatgactattatgtatctagggtctatttttttaatgtgtattctgtttgggattcattgagcttcctctagggatcaatttttttttcccagatcagatttggaaagttttaagccaccatatctttggatatttatttctctgccaatctctttgtcttccttctgagattccagttacacagatgttaaaccacgaagtgacccaggggtcacttagattctgttaatgtttaaaaacttttttccctctctgtactgattttataatttttatttctgtgtattgaagcttactgattgtttcttctgtaatatcccattttctgttaagcccataagataattttacatttcagatattatactttttaattcaagattttccatttggttcatttttatggattccattcatttgatgagaatttctattcgttcactcattataatatccatcctttccaaaatcattgaacatatttataacagctggtttaaagtccttctctattaattcaaatatatgtgatttctctgggcttgtttccaatggcaatttttttctcttggttatgaaagaaatcaaggtactttattatcattggaaccatgatataaatattgctgtgatttgacttgacacagctacaagcaattttgatatgccttggcatcattaatttattctaatttagtgtttaatgtcccagtaataatatttctagcctaagttggtgtagaatagaaacctcagctcttatgcattggaatagaaaaatacgattacacatgatcatgaaaagcaatgatgcctgaatatttggatttgaactgttttatctcacttaaactgagagtgataggttaaaagagtagtgctgcattgagtaaaggctattttgacagaatttgttgaacctgtgtttagaagttaagaaagagaggaagaagaaacaggaacactttaaaagagttgatgccaaagacagacacataaacaaaggtgagatgcttttctatttctctcccaacttaccttagaaggctgtgctgtagcaaacgactcacatttcctatgtaaagcctgttagaaactttttcagactattgaatcgccacaaagagagcaaggtgattttgtataacatcttattcagtatttactagatagctgatacatgcttggcactctaatgacgttgtaatgggtgggcacatccatggttcttcatcgagtttagagactggttagtgtattattttatgctgttaattttacaattgtgtaggtgccaccaagtcctctaatgaacaacctttgctttctgattctagaccaaagatcttctcacatatatctatttcttacatctatttcttattccataatctctcaatctcatgttctttctgtaaggaatgagaatggagatagagttatatagagatcatagaatcttggatgtggctttacagttgtgtttttttcttctgttttaaagggattggggagggaggtcttataagtatatggtgtttcacagatacaacactctgggattccatttcaagttttaatgatagtataagcagtacattgaaagacagccaataacattcatctcttgaaataagtatgctgcagggctgaaataactttggctttattgctttgaaacttcgtgaagcttgggttaagctcttggctatgttacatctgagaaatacagacctcgtttcacctgttccacactacagctgcagttttatttggaaaattgatgagggcattaagttctgaagtcatgttgattctaatgtaaataaatggtgtcattacttcatagttgggagtgccactaatgcagaccttaaaattaagggttatcttgttgattgggggaaaattaaagtaatcaactttcaaggctttaataaatgagattgcacacttaaaaatcattttcaaaccagctttaaaagtagatgactagaaaatcaatagcaataatacatacctatggaaacagaatgggctatatttatttttaaggatagtttcttgtgttatttggtttgaatttattaataaggggcttaaaagtaatcatataaaatattaagtatattttcataggaaaataccaatggtattttttgtggcagttaatacacatagagccatgaaagttgaattttccaaaagaaaaaaatgatggtacaggttcagtacacctaatgtaaattcatgaaatcaaagtatataaaggtttttctaggaagttagaggtacagagggctcaattctattcctgtatgtaatacttgttaatgtgtgtgtgtgtgtgtgtgcatgtgtgaatttgtgtgtagcatttattacattataaaatatagtatataaccttagaaactaagctctttccaatattggaatataaattgctttaaatatttggacacaatcactaccatcactattattatcatcatcatcccagctcatatttatgtagtctgagtctgggccagagagattccatgctaagtcctatttagtatgaagtgggctctcaacctatatctgtgaattaatctttgtgtcaccacaagtgtccagtaggctgatctgaacaaaatcagtactcaggatatgctttgaactgttaacaccagaaggcaagggcaactttcacttttacacacataagggagagtgtattcttcaatttcatgagtagagagtggtgtacgtgagaataatttataaagtgatgtcataagtccctatgtgcctgggaaacacaaacctgcctactccagacaacaactgggtggtttttattattgttgtttgcttttacgtttgaagcagacttgtgtggcacttcagaaacaatatgagatatttagcagtgtataaatttgagtttggagttgattcaggtcgaactttcaacagtaatctgatgtatatgtaatgggatacataattagtagtgtgctgtattgtaaacatggcggaaaaaatgtcagaagactacatgctagacagtcctcattgtctgtcttgccatccccagttcctggggccctggactaagcaggcacaatgggtctgagccagaaaagtccccattgtaagtataatcatagtcattgtaataataaaaatgatttccacttgtttcaatttactacatgccagactctatattacatacttaacatgcatatctcattttaataacaacactgagagataaataggttcaattttcatacgaaaaaaatggaggctgaaaacttggaagtgagaatgatatgatataatgaaaataaatgaaatttgacatcagataggcagcattgcaactcatgattcaccatctattatgtgatcatgggaaaattactcaacttgtctgcgttttaggttcttaaaccataacgtcgggattacttttgttctcctattctgaggatgcattcagatatgtatgtaaaactccaaacatagtacctaagacataggagggcatttgcaaatgttggtggtcctgacctcccaccattccttattgactctgcagagttaatgttgacctgggaagttttcaccctggctccagtaaggaaagtgaaaatgactaatgattttctttatccagtaaaggatgtggaggatggggcggtaaacttgggtacttttctacatcctcctcttttcctggcaaagtcccagtaaatacttatgatagctttgtgtaaaaacagcacctgtagccagacatggcaccatggaaggcaggttggtgggcaaatgccctctaagtgtaaaaaagaaggagtgttgtgggtccccagatcacccaccagatttgatgatttgctagaaaggctcacaggactcatcttgtagtcatatatgtagctacaatttgttacagcaaaaatatagaaagcagaattaacaaagggaaaggtacatggggcaaagtttggaggaaactgggtgtaagcttcctagagtcatcctccggtggggtcacacaggattgcttaatttcttcagcaaggagttgtgacaacacataaatgccttccaaggagtctaattggagtctcagtgcctagagtttctataaggggctgctcacctaggcaacttctccatgtaccaaattccagacatcctgaagtgttcagcatagaccatatggtttgcataaacaggcaaggcacgaggagccattcttatcagggaatggtgggaactctcttcaaatcccactttccagacctagccaaggaccaactttgcaagcagacctttatatggatagcagtctcaggccttctcagtttatattaactcatattaacatagtcttagggtgggttacctcttacctgcacagaaagacatagttgcgtgccaggacacaagcatagcagagcaggaaacagatggagttttgccctgacccatctgcgtgtacagatacctttaggcaatgaacaatctaccaaaccatggatggcttccctgcctactagagaagcctcacatggaagagcacgctgtgtatgacctcattctgccttcactctctggtcctttaaatgttgattgatcagccttttttcactgacccaatttgccttctctgaagatgctttttgcaaatacagcaggtttgatgaatgcttagcaagaagtttggatgacttctgcactggtttctgtctatttggggctgattggaaaacttaagacactgaatttatcttatacttgaaattctgtaaccactgttatttatgtctctgtgtctgtctctttctttaatctttgttttgtttttcttcagtaagcagttctgtgaggtagttaggactatgattgggtagttgaggctccatgtggttaagtaatcatatcagaagaatttgttggaaagactcagaccagaatacagatttgctgtttcttgaatgagcatctcttctgttgaatcaaattaatactataaaagtaatttcatggaaagaataatcataaagaggcaatatcagtccaaatacagaaaggccttgcttttctgactttctgtagtagtagcaaacccagtggagttctgaagaatgtggtcattgctatggattgatgttagagaccagagctagattagtcagactggtcaactcttctagagtgactggaaacttaagcatctaagaacaagggcaaatcagtacaaatacagttaacccttgaacaatgcaggtgtgaactgcatgggtccacctatacgtggattttcttctgtttctaccatccctgaaatagcaagagcaacccctcctcttcctcctcctcttcagcctacctgacatgaagatgacaagaatgaaaaccttcatgttgttccactttcacttaacaaatagtaaatatgttttacttccttatgattttcttaataacacatttctttagcttgttttattgtaagaatatagtatgtaatacatataacacacaaatatatgtcaatagactgtttatgttattgataagctttccagtcagggataggctactcgtagttaagtttttggggagtcaaaagttgtactcagattttgaatgcacagggttttagtgcccctaaccccgatattattcaagggataactgtaatcaagacctgacaagtcctgtctagtcatcaaatcaaaagttcatgagtgaggagagatgtaggagaagaacttaaggatgacagaatgaatacattaaggaataaagtagcaagtaaggaacagacttcaaagtaaggatgaaggtccaattgttttgccaagaactgggcttgggtgttcacttttcatctctaagtctgttttattttagcccatattatctccctcttatttggatataagatgtccagtaagtgggtaacttgcctgtttggaagccactacctgttatgaacaaggcttaacttgttcatatttcattcagtatctcccaaatgttgaaataacgatttgggcaggagagttagttttataaagacatcccaccataaaagatatttagtattcaataaagcttgcagttctttaccttaatgttgtgtcttaatatattgactcaggtctcacttgaaatctgaaacatgggttccatgatctatacacttaataagcctttaaataatgaaacaggatatacttgaagggccagctgtctttgtttctattttatgcctgcattttatgggcttgatcactaggactcagactggtccttggcaacattgcaaagttagcgaagatctttccagccctttcctgacttcctgctacatggaaattttttctctgactgcctgatgctctcatgctgcttgtatttcagtgtctgccttatccctaaaggatttgcctgccctagagttgtcttatgtaccagatctaggtttatcaatattctgggagtcatttgttaagttctcaatgtattccttcttatagagaagtctcttattcacagtctcatatattcggaccagtctagagtacaatgagtgggaatgacagtctggaaggggagaagacaaatgcaataccatctggtgcccagaagaacttctgcatacttaatcagaccccaaagccttatatcatcagcaaagtgggaagcttagtatctcacattcacataatttttagaagccatttcataccttataaattttgtcgcatttcagcaagagttcttgatatgtatttaaacctggactctcttatctaagtgctgtcattgggaaggacacaaagtgttactgggtatttgagacttagtgtggttaagcatattgttgaaaagatgggactatactctataaattgtgagaataatcatgacttctctatttccccgcctgggatattcaaggagagagtgctaaaatgaaaagtaccataaaagctctggagtagcactgacaggatgatggagacatcaccatggtgaaggttgtcctgggttgtgagatacccttaatttgataccttcttcctaaaagattaattcttacaaagtttgtctgtctccaaaatacaagggccctaatatggatcaaacaaataacagggttctcactggcttttatagaaaagataaaatgtcacttgagaatgagaagtccagagggaacacagttctccatgctggaaacagaagacagcaagaaagaaagataacgtgtgatctaacgaacgacacactgctctcgtttgtgtggatagatacaactgagggaagagacaatttgtaactggaaggactaaggcagatttatgggtgtttatgtgcctatgtgacaaaagggaccttggggtgtaatgggctagatttaagtatgaagtatgactgcctcatgaaaatgttcattcatggaccttaaatcttgcacataatgaggacaagaaactgtagctgattcatgcaaatgtctccttatatatttcttaatattgcccattttcttgttcactggatatgtgagactctggcttcatcatctcatcctagtagtcaacagattccttcacagcatttactgagtccagctctgggaatatgcagaaggctgaggtaggccttctttcagtctgtcctcatagtcatcaaacctgagagggaaacaccttttcttctttgccttgtgttctctgcatcttactgagaagatgttgtaatgttatgcttttgtttgattttgtttcctcatagagactttcagactcccactatgtggtttggacacgaagtcagtctgagtgccaccgcaccaaccccaaactattgtttctggacccagtgtggtcttttctttcaaggaagaatcttgtccatccagtgcaggggttggaggattacagaagttcttattcctttatgtattatgacccccaagcttgtgagctggtcatgagcctcaaggttttcatccactttccatctcattaggctttcagccatccctgcaaatagcaccatcttcctaaagccctggtcattactccgtaactctccaaacacaagtatttactggtcctgactaagagacttggcttataggggatctgagtgagatgttggcccttattcttagtgagttacaatcttctgagcagacaaatacgcaggaaataataagagactaacagaagataaccaggtggtttggatgatcagtgccatttcaatctctgctcaaagctgacatacttaccactaacccaccaagtacagatttgttctccaaattcagaaatgaacaaataattaaaaataatggtaagatgatcccagaaaagattagtgtagaaggagaggggtttgaggagacggtggtaacagcaaataatttgcagctcgagaaagatgatcatgatgatttcacattgatcaaattctatttctatcatatttatatgaattatctcatttgatcttcacaaccctaagatataaataattatcttaacacacgaatgtacagtttggaatcattgtaccaaaaagacacatacactcatatgttcatcacagcaccattcataatggcaaagacacggaatcaatgatgcaccgggtaaagcaaatgtggtacatatacaccatggactgctacacagccaaaaaaaaaaacagtgaaatcatgtcctttgctgtgatatgaatgcagttggcgggcattatcctcagcaaattaacacaggaacaggaaaccaaatactgcatattctgacatataaatgggagctaaatattgggtagttagggcataaagatggcaaccgtagaaactggggatgactagaaaggggagagaggaaggacggcaagggttgaaaaactaactattgggtactatgctcagtacctgtgtgatgggataatttgtactttaaatcacagcatcacgcaatatactcaggtagcaaacgtgtgcatataccccaagaatctaaaataaaatttgaataaataaataaaaggttaaaaaaaagaatgtagagcttggaaggtttgatgaaccgtcactttcatcgagaatacaactccaggaagtgagagtgaagtttccagaaaacaaagcagaaaagcagcaagagccacaatgagggtatattttggagtggcggagacctattctttgcttgatcaatggaagcatatttctccccaggaatctgtataatctatatctcagaactttctcccaggggtggaaaaagagataaatatccttgacttgtgtctccctaggccaacatttatcccctgggcctgaactgcttccgtgacagtcaattcatttgcagattcccaggagccacaatagtctgtagggaagcctgggatgggaggtgagaagcagggggtggggtgctcccagcggtgcctgtgtgaagtgggtctgaccccacacacagatgggacaagagtcaggaggtgaagccaagaggatttgaaacgaggcaaaagtgatacctagtccattactgttttctttgttttacaagtgaggaaatctcaggcacagaaagccaggtaagttgtctaaagttgaaatctgagatgtgatagggaggacaatgtaaacacagagattccaaactatcgcatccaaactcccaactactaattcctaatggaaagggttcctcttgaaaactttcagagaatgacctactaggtgacatagactaaaccttcaaagagcatcaacaagaattgtaagaaacctgtgagtgagaagcacttactgagttaccagaggacagtgggaactaagagggtgtctttaacctggaaagcaaccagtgaagccaaccacatccttcaatcccacatcctttgatgccctcacctctcacgcacaatagagatctgagctgcaatttggcacccttaaatgtacttggctatgttccagaacagagaaaaggcaatgttcgtatctgtttcacgcttgcctcgtgccagagactgctcagtatttcacgggaacaacacttcaaggaagttaatagcatctccatcttacggatgacgaaactgaggcttagatgggtaaaggatgttctttgcttccccacattgtttttctggtatatatcacaggcgtatgttttgttttgggtctgtatttgccttctagaatgatattcaagaggtggggttataaaccctggctgggcattagaataatttagggatcttgttaaaattacagaaccccaagctctacctgaaacctaaggcattagacctttttaacctaggggaacggatatcctaatgtgaccatatttcactggggatctgatgggaagccagggttgacactcaaaagaatggacagaaaatagtgaacatgttcctgagctgcatgaaagaaatatgcaagattcagaaccagggctgggggaaaagacagtcctgctcttctttgtacaaatcaaatcacctctgaagaggtgctttgagttttgggtagcttactttaagtagcagaattggaaggaagaactgtactggggaataggactgtgtccagggcaccaagacaaagccagacataacccaagaggctgacaatttggggaagtctggtgacggcaactctctcacccacagttaacaaacaaacaagaaatattttctccgggctcagtctctgtagttttggcagcagggagtcagcgtccttcctgaaacatgccctgctgtgttcctgcccagtcttgccagcagctcagtctgcatctgggcttttccccaccctctgttgcctaatccacagcatccttatccctcccctcaggccaccaccaccccccttctcccacgcacccaggctgtgttttagcaggacagctattttctgccattcagcactgagtgatcatcatcaggtacagcttcccaaacacacaactgcgctgcttgtgtagcctcaggtataattacgaaggctgtcccagcactcgctacctacactatacttaatggggagggatggtctcttgttctctattaaatattttgaaagagaacccgtaggcatgacaaggttcaggcaccaagcagaaatgggaatcggagtgcccctgctctgacaggcaagcacaagttttaattatctgctcatccaggatttaaaaattttcgttttactataaaaagcagaaaaggatgacaacatgatttcatgtgcttacaggaaatgaaattggttgagaatattgtctgctgtcacttctctcttatttcttcctttgtagtgtttatttttcctgttctatgaataataaatgactgaaaatataaaaattacagaaatgcataaagatgaacaacttatgaccccacagttcagacaaaacttctattaacatttttatatgttttcatccagtctttttcatgcacactcacacatacccacatagagacaaaagaattgattgtattatggtagtttaatattctaattgttttgttttgtgttacattatgagaaaatatttatgccaatggatacatttgaaaaacaacttttctaatagttctatatttcatgtttcactctgatttatttcactttatttccctgttattggatatttaaattatttccaatcctttgttgataactcttaataaattaataaatcacccaagatattaatcaagctcatcctatgtgttgtcactgttcatgtcagcattgtatgaagagtgaatgggctttggtgactgaaatgataggactaaatactgattctaccactagctcagggcatctaggaaagtcattaaaaatttactcatctgtaaaacagagctcatgctaactgctttgcttatttttctaattttgttctctccatttcctaggacaaacaaacaatgtcagataatctctttctacatattcttactcattctgtttctctgaagttgcaactacacatatactcacacaattcctttgttaacactacctcattctcaaggtcaaatccaaattctacatcaacgtctccctccactggttttcttcatctctgacccttctttttccaggccctgcacggatggcatcaaggtactttcattgactctggctcttcacctatgacttcttatgcctttgagtctgccatttctttttcatgggattttctcctgacattcctgcatccctttttatccagctcctcctcatgactgagaaatcatctctagcctcaactcctcttggaaggattccaaatcccaaaccacaggcagggctaagcaaccctccttgctgactcttagggctgaaccatttactcagtaaaagagatgctctattttgaactttctcaatttgaacgtttggtgctttttccctcatttctggcaacatttcaatgtttctttgctttctccttactatatctctagatatttcttcagctatacatggtcagatgactggagttcacttagaggtaaggctatcctaaacctcattattctatggtatctattgacagcgtatgaatgagtctgtgaggcttattacctaatattagaaataaaataaatcaccgaaaaacttgaagcaaagtagttagcagttcatagaaaaatcctgagttagattcctggctcagtcttttaccagccatgtggcattgactgagcctccaagatgtatgttctttatctgtttacatgaaaatcatatttgctaattcttaaagttatgtatatagagttatttctaaatgacatataataatcacttaatgataattttattagaaactattttcagctacctgttatttttacaaaagaatcacattaaaagatgctgttaaaactatgagaatacatgagatataggtggttattactatttggcattcacacccaaatatctaatcactaaaattattattaataaagaaaatgaggcagatgatcatggcatttatccccaaatctctagcaccttgcacagtttctggtacgtatttagctcccagaaataaacactgaattgaatttatggtaaaataaatttttagaggctttgatattccatttttaagcatccaatctattctatacacactcatattagcatatttatgtgacaatgaaactattgcaaacagagagaagattattaggttatggatattaagttaatggggaagatataaaatatttaatagcttgggctagaccacatcttttagaagaagaaactgaggatgaaaaaatttccgtgaactgccaggacacaaaatttgagaggggcggagttggaattaaaacccaaccttttctcaagccaattagaatggcaattattaaaaagtcaagaaacaacagatgctggtgaagctgtggagaaataggattgcttttacactgttggtgggagtgtaaattagttcaaccattgtggaagacagtgtggtgattcctcaaagatctagaaccagtaataccatgacccagcaatccctttactgggtatatacccaaaggattataaatcattctacgataaagacaagacacatgcacacgtatgtttattgcagcactatttacaatagcaaagacttggaaccaacccaaatgcccatcaatgatagactggataatgaaaatgtggcacatatacaccatggaatactatgcagccataaaaaagaatgagttcacatcctttgcagggacatggatgaagctggaagccattattctcagcaaactaatacaggaacagaaaaccaaacaccacgtgttctcactcataagtgggagtagaacaatgagaacacatggacccaggaaggggaacatcatacaccagggcctgtcgggggttgggggcccaggggagggagggcattaggacaaatacctaatgcatgtggggcttaaaatctagatgatgggttgatagatgcaacaaaccaccatggtacatgtgtacctatgtaaaaaaccggcacattctgcatatgtatcccagaacttaaagtaaaataaaataaaataaacccaagctttgcctccctaacacagtttagctttccttcatacttcaccagactgatttatctactccacatcaccggatttttgcaggtctttcaaaatctcatttatgcatctaggataaacttaaatttaaatttaattttatgttaagcattgatcaaacttgcaaagtccctctaagtattgtgttgctcttgttattgctgttgccctctctccccacctctaatccaaattcctaatgcttggtctttctttttaaacaaagaacttgttttcatagaaatgaatctcttgtggatttttatgttatatgtcaagctcccttatgaatctatccaaaacatccaaagaataaatcccaggacaggaggaacttgtattcacacatctaattaacctttaattgtctattgtgactgctttgcagttcaatagttgcttgatttttattgcccgcctaattagtgtggttaaagtggctttttaagtcagattttattatatcagtttgcttacgcaatttcgggatactccgggaagttccaataacattgtgattcttaagtgctatatatgtatacacatttgttgtttgtttgctttttctcctcaggaaaaaaagtgctttgaccaatttctcccactagagtgtatgagtagtctatgaaattccttaatgatagcaaaagccttttcattaattgtgcataaattatcaacacagccagtcaattctaattaatcatttttctacccaataaaccaccagattgacagatttagaattctgaaacaaggggagcagtgaaggaaaccacccaaaatactgcaatttaaggcaaactaacatatatgcacatctctaaaaatcagattctacagctgtaatttattagtgagtccatggaatgtagctaattgagtatgcatctatcaggggatggttaagatttaaaataatcaattagatgtacaaatcttattgcataccatggatcttttttcttctttttgtttgctgttttattttctaagtaaagaataaacttgcctccaattatataatttgtattttcacatgttagcattcttttcttgttccacaaactttctaaattactgaaaattatcatgaatgcaatttaattttctacatactgagcactatggttgtctctaatattggccacggttgtagtttcccttagactccctgagctcttgctttattttctttgtctctattctcttggctttaaaatagagttaagcagtttgaattatttctagatctctgtctctctctgtattggagagacaaaagatctagtgcttagcagagtcctcaactcatcactaatagtcaaagtattcagtggcaattgccctgtgtatgaaaacagcagtgcaatacagagtaaaagtactggggcatgctgtctcttgcacagaacaggaaccaagagtaatgggttctattccctactctatgtttgatttactggttagccttgggcatacgatgcttcttaccctttcaatgcgttattctttccatctggaaaacaaagataattgtacttgtagggagggaaaagggagaacctgacataaattagtttggatagaaattatttgcaagattcaaaaatgattctgaaatgtaatccattccacatttattgggcatttcctatgttctaacaattgtgctgagtgctaaagaatacagagtttgccattacattggtgctcattatctgataaggtgtagccatataatggtaattataatataatgtgaaaagttaatattgatgagcccaactatctatttctagcagagagaactgaactaaaatttatttgaaacatcttctgtaactgttggctcatcataaatcaaagtgaattgcatttataaggatagtttgtctattagtaatctgaatgaaggaagacagggaaagacatctggaaaattaccacagtagactggattatcgcttgtaactctttcttccccattgtgaaagaattacacatgaattgtctttaccacttgactttgtagcgactcccattacaattgacagagtgtgcatccgtcttccattgactgtggttttggtgtaatgacttgctgtacccagtggaatacgttgggccaatgaggagacattgcaccagttctgagttgagtcttgaagagtcatgggaagtttctgccagcctgatgggatttcctaccatttgccaggacaagatcatgcttcaagtagctttgctccttggcttatgaaaagaacaaagaaatgctgcacagactgaactccaccaaaagcctggattccagtctaacccagatgataccagtctagaccagctgaccctcagaaacacttaggagaacaacataaatgctgttgctgtaacctttgcagacgtggggactgtttgctcacaacattatcacggttaaggaaataagctggttaataaaacatctttttgtaaactcaaacaaaattattgactaaggaagtggtcatcaataaatgataaaactattaggtgagaggttgatgggaaattgagtctttacatggtgtcagactgtaactccacagtttcttgccaggcagagagaacagacataacatcaatggagagatcaagctttcactaccttagtacagtgagtcactaattatgtgacaaccagacaccataatacagcatatgatgacacatcaacttctcagcatgacctatgaagtgtttttgccaaaagtgattaacctgaaattagcagagtcctaggtcccaactctccctttacaggaaatacaaggcatagagatagaaattaaataccaccagttaacatcagaaaaattcatcaagcacacgttctataagacaactgactggttacttcaacaagtcaatgttacaaaaagaaaaagtgacaaaggagtggaaaaaaccatattacaatgcaatgtgtgattctagagtggatcccagtttgaatgaaaacagccgagaaagacactggaagacaattgaggacatttacgtatgggtcagcttttagaatcactcagaaattattatatggttaggcttaatatacttaatatagtattgtagttagtagaaaactgtcccaacttttagacatgtataaggaattatttagagtttatagcttatatgtaaataattgacttgaaattacataaaaacagatactaaaattatggcaaagatgttaatgctgattaaatttggagaaaatatattaaatgtttatgattctattctttctaaattgtatatgtttgaaaaattctaaaataaaaatgaccagtggcagtgtacttaggactcatgctaaaatcatttgagatgtcactctgtgtgcaatctggccctatgtttagtgttgtttttagtgttctccaattatttcactcatttaaaggctgtatccagaaggggtcagtaagctgcataaagataagcaccaagttttatacttgttttcacttagcccaaacactcagtgggtatgcgagtaaattcattccattaaagatgatagaaaggactttcttttcattatttgctattacattatgtgactatttattgccctcctttgttcttatcagaggaagcagagactctggttgtgtgtctccttatcctatgaattagttgattaaatcagtccaggcagtacccacttgaagcaatcatgaagccagtcaaccggctggttagagctagtcagagatcacccaccaccactgctccagattttctctacatgtcagataatacagaatggaagaaaacagactgtgtgtttaaataccaaatgggtccacgcagtgtattttttaggtctccatgatgggccaaatatatttagaaaggagaacattatgacttaaatatgtatcaagaagctctcaaccttggtttcagtaataaaaaggtgtccatcatgttaatatcattggattaattgcaccacttttttttgaatcctctaatcaaatgtctcatgcttgtcatgtaattgttgaaataccagacttgattgacagatattgcaaattccccaagggtaaatgtttccaaaggaaaacatagtcatttcaatacagcaattaattataaacagccattaatgacaagtacacaggtctctctctcaacacagaggtcagaaaagtaaggtttttcctgaaagagatgaaaagttgtggttaccatcatacagatataatttttcaaaatattaatgaaaatgatacaatcatttattttcacccaccacatttcaggaaacacactcaatactctaagcatattttttaacagggttgttggtgtggggaggcggtgcttttgactaaaagtcttgtatgctagcaacattattttaaataataatactaataatagttcaggtggggattaaaatataatcaaaacaaaagtaacaaatcagtaagttggtaacatgtgaactgaagccttacatggaagactacatttttcaatggttttttgttttcttggaagggcattaggtaaatttagcatcagatgtcatcagtataaaataatgtaaaatattgaatcaaataccctgagaattcaaggcagaagtagcactatatacatatataagagaaagaaagggagcagggcggctttgcgttgtaattgtctggatgaaagtcgtaatttctacatcactcttaatgtacagaattaaggtccagagtcaagtctggacattatcaggaattgccactactgattagcaataatatttaacaaggaagcaatggaccacacatgggaaaggaaagacactgttgtgaaatgttgacaggaatttatttcttgtccgcaaaactggccgaatgatttatatattgtagttaggaatcagacgagaaccttatgacaattgggaacagtatggattatgatgaggaaacaggaagcgtttcagaatatgttatccacatgtattataagggtgacttttaaggaaaaaaagaagtaaacttttcagtggcagtttagaaacagttgaaaacatgcaaatacagttaacagtaagcacagacatatttaagtcaaagctagaagtattttaaagaacctaaatatctatatgtgtgtgtatatatatacatatgtgtgtgtgtgtgtgtgtgtgtgtgtgtgtacacacacatatagtgagagagccaggtgaaatccaaacatcagaatgtcttcaacatttttccagacatcaaaatactcgaacaattttgcctcatgcatcaaaaataagaattctatcttgtctctcttcccactccaaaccacaactctgaaaggattttccaaaaaattgcttttatcatgttacacctgaaccagataaaataaaataaaattaaattaaaataagcattgatggcagcatatctcaccactctaccacatcaggtctatgatcgccaggtagggctctattccaacatgcttgtcaatatatgattctcttaaactctatatgaatacattttcttcagtttctacttgcagttcttctgcagggggctcagattaaaggatctgggtggagggacaatttctataaatatcatctttatcaccccatccctactggcaccacattcactcctgttactactaatactacgatcatgaagcttacttttaaaatttgaactagctttctccaatcctttcaactttagccaaaaataaaagcctcataacaaactgacccattagggaggttcatcaattattacttaaaaaggtcctaaaaatctcggtttaagttggaattccttctacaacttattatgttaaatttaattgttgacatgctcatctttttttattagactataaaatttcaatggcagaaattatgtgttgttaatttctcttcctcagtgcccagctaatacttaggaaagcatgttatataaaacaacaagtcatcaacaggcatatatgttacaaaaaaactcaaggcaaggaaaataaagaaacacaagtgggtttttggcatgtcattttcaggaaaaagcagtgagtagatcggtttttctaaaatgaagccctctgagttggcatgtagagagagaaagaattgaggtggctgttaggatgttgcctacaggctgttaattatcgccttatttgaaataatcattttactattcagaacattaatttaattttaatggactgacattatgatggtttaattgaggttaaacagtgaagtcttatatttaattaaaagtaaaaaaacctattatagagtattataaaaaccctgtatgtgcctgccaatttttaccccaagaattagctagaaactctcttttcaattgacagtgaaaatttgttctgcaatatctatttggttttacgtatttgttttaaagagtatattcagagagtttcagagaaaagtactaggccaattaattggcaaattcaaaacttcagagttttggccctgcccttcagccccactgcaaaaacctttatctatacttataatggacttttcactgcagctgaacaaaaatgccgcatcttggtaccttatgcatgattttcttatcctaagatatctgtgtatagcttagaagctttgtcttttgacagtaactacatgacattcatcgaatctggtggaattggtaaaataagaatattgtatctctaccaagagagtatcagtgactaaatcttatttttcaattttaagtcattattaagatcctaagaaaagcccagccaaaatatggagacagataagaagctctgtggggttctgagagaagagatgaagctggcccaaccattgtctgatttttttgctctccactgagaatgaaacacatggaaataggattgaaaatgaaacaagaatcagcattggactaacacagctggatgttaggcaaatgcttattatgtgtagtgtttacttttccagaggagagggagacagttgtaatacttaagaaccaaacttctagaaatcaaacataattctatttatgcttctccatcccccaaacagtaaagctcacctttgttaatgtttcttgctttctcaactgtgtttcttgcactgtgctaatatgccttttatctacactatgttatttaattcttttatccaccatgtaagtccctcactacaagttctataaggctgtgtaatttgcccaaattcacacagattctaaatggtgaatattgggctcatatccaggtcattccccaaagtctaacctcttaatgactatttcacctgctaatgaatattcctacattaaattataatacttcattgcaagtaggttttttgtgtgtgactgaatccagtggagttaaaagggatcttcaaaaggcactccgagcacccttatagtttcagcaaaatgacatgaaacctctctccttgtacctctcaaaactctcctcctctctaaataaataaataaatggatagaggttttttcattttatagcacaactttctttagttaaccattccaatatttattacctcttctgcttgtgcctgcctccttgtgtgtaattcaataccctcaaaatgcaatttgattcaaacagctggtccagggatgcaaagtgcctgtcttattctgggttgagcgagtgactagccctgggctggctgctgtggcagggcacaaagaaatgacctcagcccataaggagcttaaaaactagtagataaaatgaggcatttacacattcagcatatagaggctatattgcctgtgtgtaatgaagtggtaagttgagtaatagactaatactaaccagatttcagacagcccacttgaagagacaggagtagctgagggtgtcttcctaaatgagatgaacccatcattggccttgaagaaaactagcttttattgaatgctctctatttggcagaaagcgtggtatatggtagatacttcacttatacttgcttatttgatcttcacaaaatgagcattattatctttttatagtttatagaaaatatggttcaaaagaaagtattgactgtgtaaatccacacagtaagtttttgaattaggccctgtccaacttatctgaatctgtccatctatccatccatccccatccatctatcttttttttttttttgctttttgcattactttacaattgcctccatgattgctatatcttgtgcagtaatatttacaatttcttgcacagaatccgttgcttttttgctaatagctcttctgcttttctttgtaggactgtcccacctcagttctcaatgtgtgttcttcaggtagggctgaaatcttcccatcaactctaggggtgaacaatcagcaaaataagcctcgctgaacacagcgattatttcagctggtataattggtcatttatgtgtgttgagagaaaagggccttctttctgttaaggatctcaactctgaaaataggagtccatggtttttagttgccaccttgctaccgaaaaatgagagggtatttgagaaagacatcatcagagaaaaagcaaatgtcaagtgacagggacagaaagatttgggcactagcatttgcttgcctggtcatgcataaattaactttttatttttgtctcaaccagttggatttgatgttctgccatataaaatcaaatgagcccaggcttacatggagggtattccaagaggggttgacaatttggaggtgacaggatgaaccaaggttaatgatgaggaaaatgacacgttttaaatgaaggcattaaaaatgtaaggctaaagtgaagtagaggtgttacataggagacagtagagcccaaatcccttgcactagctttcattctttgcaataaaggagaattcggttgacccatgaggatggtgcagtgacatttaaagcaccacagcaaaaatgcactgaatattaaatgcactgtagaaataatgtgcatcgtatgtttgtgataaaaagaaagataaatataattgtagagactctatcacaaatagaaaatctcctgtgaaatacacttatagaaacggtcaatgttttatgcatattaaaacattctccaagatgatacaactgccagcagcaccatagttcattttaaaagacaaatacattctaaaaataaaataaaactagcaaacacattatttgttcaaatagtattttgaggtcaaccaagatgcacttctagttccttgcaatttgagggatttttataaaacagactttcaattgagattttgagaaacaccaaggcaagttaaaatcttcatgactttattcaacaaaaaggtggcagcaattttttaaattttgtgtgaaaagtcctacaacagcaaaaatgacctataaaatagttcaaataacagcctcatggcaaaatgactttttcattctcctaagaaaagtcaaacaaagtataaatctattcaaacagatggacttaaattgcaagcattaattcaattcaaactttggtgcattgtctaaaaatcgctgttgagaaatagctttaagtctgaattatcaaaattagtaattaagattcctaaaacaatccaattcaacagttactgagcaattactatgtgccttactctatttagtatttaagatacaaataaaattcatccagtccaccaaggaatggccttagtatcctcgtctgtcatataggaatgatgatggtactcataggattgttagaatgagtaaattagtttaatatacataaaacacttaaacagtgactggagcttgacaaatactctttagagggtcattattattgctctgtgaataggtatattcacaaaactgtggaagcattgaagaggtaatggttagttctgtcttgggactagaaaagtcttcaccaagaataaataatttaagtaaacctttaaggatgagtagaagttcactaaatgaaaaagtgtgggtggcctctctagggagagactgatgggtcaaaattctagagccacagtagaacttgatatgttcaggaagtgatgaacaggctgcatttgatttgaaagggtactggaattttattctctagggcataggggataatcaaatttgtcttttttggcagactagtggtataacaagaattagttttaaagttgcccctaaattatcatgtgaatattatcatgtgaatatacatgagtagcatcatatgaaattagaagcacctggcttcaaaccccatctgtcacttagtgacttctctttcctgaaaatataaataataatacttaatttggagacctttcacttaaaagagacatttttagactcccatcatgtggcaggcactctgtggtgcttttctatatatatggtgataagtatataagatttttatattataaaagtgtcagacaatatgattactaatgtgttaatatccattttaaagttttttggtttaattaataaacatcaggcttggttacactcattaatgaaagaaaatatgaagcataacataagcaattaaaatagtataacaataggataataaagcacatcatccatcttcaacagccatcaactcacaccaaccttggttcatctgttgctccacttacctcctctactttctggattaaattgaagcaagttccaaagaactattaattcatttgtaaataattaaatatgcatctccaagagataatgactccttgaaaatatcctaatatcacatctaataaggaattaacaataattatgtaatattttcaaatatccagattctgctcaaaattatattaaatttatttgtctgaatcaagattcaagtaagattcatatggtagttggctgacattgctaaagtctttcttgatcttttcatctcttgtttctgtgaaatttttattttgttgttgtattgttgaagacacgaggttgtgtgtccggcagtttcaccaagtgcagattttgcttattatatctttgaggtgtctttaacaagatcttctagccccaatactttctgtcagttgttggttagatctagaggtaggatcaaagttagatatgtctttttaaacaggagtacttcacaggctttgctgtgtatgtttatcaggaggcacactatgttatttgatctttaatcttgagatgattggtaattatcatttaggactgacaaaaaagcaatattttaattctatcatttcttcttcttttaagttgaagtacttctatgaacagaaatcttcccttatcagctacttggttgagatacaacaggtaaattattgataattaccctttatttataagcttttaaaatcgtatgttgatacctcaatagtctccaaaggtaatcaaagagccttttaaaatatcattatgaatgaataaattgagaaatatctgagaacaccaagcttactagagctcagatatttttcatctttgggcagtgaaagctaagtcaggtaggctcttgaatacttttgggaagtttcttgtcaacatataagatattccagactcatgtcatatatttccttctgcagacctagaattcattatttctccaagaagccctgggtttccttttagtggaaaatagaacctatctagagaccaaaatctaggagtgcagaatgcttattgctattgggttgttcattatttctaggtctttacattgacagagcagaggatactttttttttttagaaaataaaatatattataaatttatactgatgactacaattcaaatttagggttacagtattttaatttaccctcatcaatccttcatttttttttttacttctatgtcaaaaatcttggttttcagcaacataaatgtgattactcatttgccttaatccacactacatataaaacactcactacaaaattaccaccaccaatataattatcaaaaacacagtttatggtttatagttcctgaagtttattttgtccttagggtatatctcagtgtagatatacagtgaaaatactgtgctttataatcatttgcaatagttcttccttctatagtaattccaccaactggatatttaatgaagtttatctgttttctttactttcagaatttagatattgtttttcaaatctaaattacatttaataatcacataaactatatatgtgaactcagagtcaaatcttcaaagactattgagacatgaaaaatgttggttgagctgccacgtttcaccaagggaatttggcggggtggtcactaaattcatgcatttttgaaatttctagttttagaaaaagactgagggctcacccatctagaagcagatctagtttgagaatgaagaaagttggctggcaccaagcaccaagggacagtagcaatgtgaaaacacttcagaaactgctcagatcatttttgctggaagaaaaagtacactaccaagtaatattttaataggtatttatttcatcggaaattttaaaaaatcagccacaattttcttctacctttgtgaaattttgcgtgtgatttacgagttggcattaagagatcacttaatacttgctgttctgccctattctttggcattctatcataaacattttccgtgtggtagcatattcttcctattttcattttaatggctgcatactatttcatggggtgaatggaccttaatttaattagtctgcactaccgtaaaatatttaggcagttttcccttttcttttttttctgttacaattatcttccagtgaacacacgaagctccataaaagtaattttaagcgctttgctttagctgtggcagcagtcgcaagtcgtatttttgatcatctgggtgcacaatactttaccaggtcttgctcaccagttagataaaatatttgctagttatgatgcaaggaagagcaaaaatagtaaatattattttgaaccagctgccaagagaacagatggaatcccacagtatccaaaacatttgacctgaagttgtcctctgtgaccagatccatttcttctcaaaatacatttttcaagcagtagttccctgaccagtagaaaatgctgcttttatctttctcttcttttgtaaatcatactgtatgctatcttgttaaaacaccccatgccagagaagtatgaatgaataaatcttcctgcagatctaggtttccttcaggcataactaaacctggcaaacacactgttaaaatgaccagccacagcactggaccccaagagagctctatggtcttacataataactgcacaacaatcaaagaggccaatagagggggtgagctgggattttttttaggtagggggagggagcggaagtaaaaacagaagaaaatatgagctgcagggctaattggatgtaatttggagatttcaaagaacactgactacaaggtttgaagaggtgcagtatttttgaatgatgaggcaccagaaactccctaggtagcattttgaatttaatttaaatgagaatccagtatttgtgcaaacctggggctgttaggatgcaagactatcttgggattggcattggcaaaccatgcacagagctgtgatgaagaaaccctgtcagaagacggtgcattatggctttagagagtgaatttctagacagtcaaggttgtgtgaaatggggtactttcagcatccctagagatgatgtcttggttggttggatcttggattttgcagattactgatgaaaacattttttggagatataagggactgaaggcataatatgaaatcttactttcaaaaatttctatcagttaagttcaaagagtcattttggggcttatggggatttataatataagtttgtgacaggtgacattattttcttatactgggccttgaattagattgaataattaactgtgatttaagatttgaagaggccagtattttctaaatactaaaacagtggttttggacgttttatgcttcagagatttaattcctgcaagattaatttctttgtaaaacccaaaaagtatctatattttgaatcagacatccagattctttaggaagcaatttttcaccaaagataattgctgctgagatttaaatggatagaatcctagtcaccttggagcatgaaacatgtctaattgtcccatcattttattagaatattattttatttaaaattttgccaacttcattaagacataaagaccaagtgagaaagagcaattcatctaaaataattagctggaatttttcattcatgggtcttttgccaaccttaatcattaacctggactttaacaacttgtgcattcttgctgacagcctgactctcatcttgaactctccaacccaactgaagtttttttcttgagataaactgcacactgactcttcaagtatctgaacggcgggggaaagcttagacaaatagattagtaacaatgctcaggtgtgttgagaaatgggcgaacgaacggctgtccttgactaactctctggatgctcagagagacatttttattgtttcgtgcagtccttgtttaataccatgttttgaaatacactgcaaagttgacaagacgaacagtggagaggtggaggtcttcttatttctttgtctttgtggcaagtgtcaaatctcactttttccctaagattcctagaatgcacagctaagaggaaacatgagaatttatctagaataatggcttaacaattatttcatcatgacacatgagacagctggtggatcatgttgtgcacctcccatgggttattttaaatagttcctcaggtgtttggaatgcgcagccaaatttgtgaataactggctggtggaaagaagatggcaccatatcctcgttgataagataaaagctttagagtagaaaattgctatcattaattttccttcaaactttctctgccccctcttgcctctaagtcagatcaattgtcagcctgcttctctgccttcgctgaattgacagttgctaacacactgctaatggctaactgggacttattgattacagaaaaacgtttggctcattcaaaatcaaagtgataacatgtttgaaaagatgcttaatatatgtatttaaaaacagctctcacaaaagattggttaagggctttaagatacaaagagctgttattaacaaataaagtggacttgggtcgttaacgggtaatgtataagaaaattaaaatgggtgataacattttaaaagaagtttgcctttattaataataagataaatataatttcaaactataacagcatagcactgtgcattaaatctcatttaattggcaaaagggcaaaaatgatgcctggcagtagtgaaatagtgaggtttctacattgcagaggtgttgctaattggcacagccactctaaagaaagattagacgatatggacctaaattcattaaaatgtgtataccgttgaagcagcatttctagtagttagcataagaaaataatttgtcaaatattcaaagatgtttatacacaaatgttcatagtaactttttaaaatattcaaaataaaaaaaaccctcagtggacaccaatgaataagttttgaatatcctttcaaaagactatgagatagccatgaaaatcaatgatacagatgcaagtgtatctatataaataaatctttaataaatatacagtgttaagtaaaaacaccatactataagaccatatgtatgtacgtatgtgtacatatatacaaatatacatacatatctatgtaacttgataaaatttggacgattataaatgaacatattagcaatatgctccctgagatgatcgttttttctctctctagtgctctatattttataattcacttctaaaattttaaaagaacacattattaaatttctgaaaatgaaaaattcctttactttagacaaatgtaacaagaaattatactatttcaaaacttactggtcgtgacctcttaagagtttatttcagtgtctttgaaaagctcagaaagacaactggaactagaaatataggcaggggttttttattctgtccagttcaggataatactaataaactaaaataattccaacgttataggacaagcaaagtctgatttggaaaggtcagtttatgaaatgagagtcgagttaatagcaattctcttccccctcaccccattccattataatttgatcatttaaatgagaagacaaatatattattattacgaaagatgttattaggattcttcccatctcaagcttggtttaaaccccaagagaatagctgccaaccacatccagattccaaagagaggcctgtgggtgccagattaccaaagcaaggtttaccaatgagatagccaagagccagttttacaacccttaaacccttagctgactgtccacctctgatctatagaagggatttgacagattgagagaatgtggtgtagattacaaaagagttttagaaaagatttgtaaggatactgtgtgcccccaacctctctgcccttctggtccccacccctccctaccatgtgggagggatgaagatgcttctccctgatttcaagtctaaaaatgggagtctcgattgaactatctggaacatttgatatgtgtctccctagagctagggtgctgttgcattggtatctagttgatgcctgagagatcaaaaggcttgagattatggctggccagttattctcattcaggacaaagatttgctgcaaggaaaactgcttaaatgcccagagtttatcagcatatagtttatgttttttagggaccaaatgtgaccaagatgggaggtggggaaggagattctggagttgttttaaagggggtgagaaaacctcaacagaaagagacctgtgttgaatgcctacggctgctgagcagagagtgaggagctggaagaggtcatttgccagctcgcaagtaagatgctggagtttccgacaaacccacacatttgacccactgtgagtcccctctaaaagcatgcctccttccgagacagcaccactcactgcaggccacgttcccctgctctaccccgcctctatcctgaagaaacctgtgaatgagggaggagttaacaggagaaaatgaggagtttttcctcaaggccagagctaaaggaagagacatggtttcactttaaactaagttgagcatttggatgactctgttaatgatctgagagtacttttggggactaaagggactggagaaatctttatgatctgagaatgaccagaaaactcacagggcctgcctgcgtgtccagtgtcaggaaaaagactagcgaaagactctctctcctttatttgtatttatcatttaaactaaatcatacatatcaagacacttcacttctaaaatgtaccatgcacctcttaagaatagggacaattgctttcaggaccacactaccattattgggactaaaaaaaaatcaattatcaataatttccaatcatctagtgtctggtatatatgcaaaatttcccaaatgttgcaccagtgtctttgtagctgttgtcatttattcacttatgtatttaattagtatctaatctggttctaattatgtttctttagtctcttttggtctagaatattccattcgttgctttttattccactccattttttaaaaatccaggatattctttttatagaatatcccataatttgtatttggttgattgtttcatcttgttgcaattaaatatcttcttctatcccttatattttctgtaagcttaaataagttagcttcgggttaaatattttttctctgtcttttttgcaagaatagataattgggaatgctttcttattatgtcatatcagattgttctgatattagatatctaagtgtatccacttggctaatattgttactttacagtttttcctttgtagttcataagaaatctaattctgtggttggggaattgtgagtactctgctcccgaaccatttctcaactaatggttttagcactcattaatgatacattcttaataaattacaatactatggacttgaaaaatggtaattttataagtactatatatatatatttgtatttatcagagagtttttctctaaaagaagtttcctttttgttttccttttcttttgtttgagcataactgtgtaactatggacttagggttttttttttttttttttttttttttggagaaggagtcttgctctgtcacccaggctggagtgtagtggtgcgatctcggctcactgcaagctctgcgtcctgggttcatgccattctcctgcctcagcctcccgaatagctgggactacaggctcccaccaccatgcccagctaattttttgtatttttagtagagacagagtttcaccgtgttagccaggatggtctcgatctcctgaccttgtgatccacctgcctgggcctcccaaagtgctgggattacaggcgtgagccactgtgcccggccagggggttttaatttatatcaatgggtttcaattaattaccattgtgattacttttgctgctaaaattatcccaaatttgacaaggaatgttccttcaggctggctcttacatccatttttgagaggcctaataaatacttgctctctcacttattccaggatctccttaccttacaaacctcagacatagaattagctatttctccatatagctctggttcttttcatgggcaatcatatttagaaaacaaaatctgggtgctagatgtgcttactgctattgggatgtcattgcttctaagtctttttagtgggcagaactagaagatatattaaaatggaaatcaattactttgcattgatattttcattaaaaatttaacattatagatttgttttctcctaactttatttatttcatattggtttttctttctttttttttttttttttttttttgacagagtctcgctctatcacccaggctggagtgcagtggcacgatctcggttcactgcaacctccacctcccagattcaagtgattctcctgccttagcctctcaagtagctgggattataggcatgcaccatcacatccagcaaattttttgtatttttttagtagagacagggtttctccatgttggccaggcagtctcaaactcttgacctcaggtgatctgcctgccttggcctcccaaagtgctcggattacaggcatgagccaccgcacctggccagctggtttttctttttattacactgaagatctaactttttgtggattttattttattttttatttattattattttttgagatggagtctcatgtgtcacccagactagagtgcaatggtgggaccttggctcactgcaacctccgcctcctgagttgaagcaattctcctgcctcagcctcccgattagctggattacaggtgcacaccaccatgtctggctaatttttttgtatttttagtacagatggggtttccttatgttagccagactggtcttgaactcctgacctcaagtgatccgctggccttagcctcacaaagtgctaggattacagtcatgagctgccaagcccggcctttttgtggattttaattgtcttaatgggttacaatttgctttatcctaattgtttatatgtgtgtattactattaaatttactgagtgaaatttagatacaacatcttcttggaatacaagctttgcagatagatttaaaaatataccccactaaaatgtagaggtaatactgtcttcaacagatatttgaaacaattctttaatctgcatggtcttatcaattaagttcatttggtaaaccaaatgaattgataaaaccatgcagattttggcacttctgcctgtgttttatcatctgctatctttttcttttaggtaagattttgtttctcaaatatgaaaagcttttacatagttcaaaagttaaatgaatataaaaagtatattcagagaggtctcattcctatcctgtcctttctacccaagtccctatccttatacagagccatttttttaagtttttttttatttgtcttttcctattaccctatcattaattggtgaatgaggcagaggagttatttgcctgaacacacatggccacagagtggaggagataggatttaacccagagcagtctggttgcagaagtaaacccttagctactttgcaaacggcctattaaagtaagactgtgggggaagacaggctttgaaattagcaggttttatcacttgctatctgggtgactttgagcaaattccttaacttctctgaggtttattttacccacttatgaattagggataataatgtttactttgcagagcgtaacaaagaatagagataacttaagcaaattaagttgtagattgtcaggcacatagtaattactcagtgaatgttacccattattataactagtaaaactataatagtacgactcatacagaagaacactagaaacttttattgttcagttgtcactgaagtatgtgttgatctgatctatgttatttagtaagattaaaattttctaagagttgatgaacttgaacaaaaagcaaacaagcctgggtttgataatttatggtttcaaaaatgttaaaataatctcagagggctttgctgattttggttcatttttcaaaatagaagtttcaatattttagtggaaaagaatgttttactactactagaagtcatatagaaacaataaggtaatttctagctgaagtgagttttacgtaaacttgtttaacttcctcattgttttttttttctgtttgcaatataagatattcttatgctcctcatgttttaaagaatttttattctgtgttgaacacaaagaagtttgaaccatgcagaggttgaatttaatttgtataaaatcctcttaatagcatggtctaattaagacacccattacattcatggaatgctaatttaatttggagggaaatgtagttgagcactattgggtttaccataaaattaacacagtggacataaaatggatgtgcttattagatattgttatcagaaatattatatgaatgaaaatcacaatactgctatcttgatggaaataattgttttacagaataaggcatactgtgtgattaactagctaatttatatgaagctatatgagcaagactgttagtgaccgcttttctgaagacaaagattattcaatcgtttttttctgacattagtaaatgccttggcccctgccttagagagtttgttatattggtgaaatttatcatggtagattgaacacattgacttgtattaaggcagcagatctcaaactttttatctcaaaatctttatacccttaaaaattgttcaggactccaaagactttttattgatgtgagttatatccattgctacttacataaaaaattaaaatgaagacattttaaaaatatttttaatttatttaaaatagcaacaataaaatctcatatgttagcataagtagcatagttttttaaaacatgaggatattccaaatgttgacagacttcattgcaaattgtaagaaaattacatttgttaatatcacattcttgaacatctataattactgagaagctttcaatgtgttggtgaaagacacacgtttcagaatttgactttttgcttaaaagctgccagttattttcttcaaagtgacagattcactcattcatttttttaagaaagtgtctgctgagtacttgagtctaaccatagtttattagtcattctttcaataaaaatcatgttaatgtaaaaagcagatagttcatttcacaagtcaaacatttgcacaaatatttttccttgaaataatcactgtgctttgatatgcagcagaactgctttatataaacttcccattttgtcacagagaatattaaaaagatgtgcaacaagtagttgatatgtaaataaacctaataatttttatagcttcaacaagaacattcttatataacattggcattttctcctgcctgcaggcgagtggccttgaaaaataccttgattgctggaagagttcagtgccaaatattcggtgccaaagacactagcagttctacccaaaattccttttgcatcattggcaccaatgccaatacagtgaaaaagtcaaataatgtcctagaattattaggaaaactgtttagaccttgaggaacactacaaagtgtcttggagatccccagggctctgtggactatactctgggaacgctgtagtaagatccatgtttgctcagatgtccttgaatcaggacagagaaagcatttacaaagaaaggtggctctgtttctgctacggatgcagactactctccatgctccctgagaatttggggtactatgagcctttgtaggaagatgcaaaacttttctggccccaaatcccaacagtatacctccttagatggtttttgatataagacttttgtgtcacaaacagtccataaagagggattcactttgaatatttggatggtggaggaagtgagggtgggtagaatatgtaaagaggctcaaatcacaaatcacacaatggtggaacttttgctatcgccacatacttggaaagatgactggagatacaaatatagaaggaaccatttgcaaactaacatagtacaaattgtacttttcttaattctttggattttattatttactttttgaagaacattgttttactttggctaatttgaacaagatatttgttacaaatgggatgagattctaatatcttgtattttaagatccctaaataagcaaggttttgtttcaaatatttagccttggaataaaacgttaacacagtataatataaataattatatttcgttaatgctttttaccacataggtgatgattaagggatgaaaagggattttcattcaggataagctgtttacaagattgaagactttaggaggatcatctgatctgttaccctcactattgtcctccaatccacacaggaattggttgagcataattcagagcaggctgtcaggggaacgactggggcccagaagctaattaatacaaatcacacttaagattttatttcaagtgctgtgcagaagctctttagtttaattaggtcctacttgtcagtttttgtttttgtttcagttgcttttgaggacttagccaaaaattctttgccaaggctgatgtcaagaagggtattttctaggttttcttctagaatttttatagtttgaggtctcacatttaaatctttaatccatcttgagttaatttttatatgtgctgacaggtgggggtctagttttattctcttgcatatggctagcctgctatcccagcaccatttattaaatagggagtccttttcacattgctcatttttgtcaactttgtcaaagatcagatggctgtatgtgtgcggtcttatttctaggttttccgttctgttccattggtctgtatgtctgtttttgtaccagtgccatgctgttttggttactgtagcgctgtagtatagtttgaagttgggtagggtgatgtctccagctttgctctttttgcttaggaatactttggctattcaggttcctttctggttccatataaattttagaatagtttttcttattctgagaaaaatcatattggtagtttgataggaataatgttaagtctgtaaattgctttgggcagtatggccattttaataatattcttctaatcaatgagcatggaatgttttccatttatttgcatcatttctgatttttttcagcagtgttttgtagttctccttgtagagatccttcatctccttggttagctgtattcttaggtatgtccatttttttgcagctattgtaaatgagatgtgttcttgatttgaatctcagtttgaacattattcgtctaaagaaatgctactgatttctgcacaacaaaagaaactgtcaacagagtaaacaacctacagaataggagaaaatatttgcaaaccatacatctaacgaaggactaaaatccagaatctataagaaacgtaggcaaaaaacaaataatcccatcaaaaaaatgggcaaagggcatgaacagacacttctctaaagaagacatataagtggccaacaaaagtgaagcaaaatgttcatcatcactaattatcagagaaatgcaactcagaaccacagtgtgataccatctcccactagtcagagtgacttttattaaaaagccaaataataacagatgctggtaaggctgtggggaaaagggaatgcttatacacagtggtgggaatgtaaattagttcagccactgtgaactaatttgtaaactccagtttggagttttctcaaagaacttaaaacagaagtacggttagacccagaaatccaattactgtgtatatatccaaaataacataaatttttgtaccaaaaaggaacatgcaccactttgttcatcgtagcactatttacaatagcaaaaccataggagcaagttaggcgcccatgagtggattggataatgaaaatatggtaaatatattaccatggaatactacacagccataaaaagtaataaaatcatgctctttgaagcaacatggatgtgctggagaccctaatcctaaacaatttagtgtaggaacacaaaaccaaatactgcgtgttctcacttatagtgtatattagtctgttctcacactgctaataaagacatacataagactgggtaatttataaaggaaagaggtttaattgactcacagttccacatggctgcagaggcctcacaatcatagctgaaggtgaatgaggagcaaagtcatgtcttacatggcggcaggcaagagagtgtgtgcagagaaacgctcctttataaaaccatcagatctcatgacacttactccccatcgtgaaaacagcatgggaaagatctgtccccatgattcagttaccttccactgggtccctcccatgacatgtgggaattatgggagctagtcaagataagatttgggtggggacacagccaaactatatcacagtagaagctaaacattgggtactcatggacataaacatgggaacaatagacattagagacacctagagtagggagagagggagggggacatgggttgaaaaactacttattgagtactgtgcttagcacctgggtgacagtttccataccccaaacctcagcatcatgcaatatacgcatttaacaaacctgcacatgtacccctttatctaaaataaaagttgaaattatattaaaaattatttcataaaacaagcaagttgtcaatttgcaaagaatatttcaagtttaaggcctttattctgtactaggatcttcaaaagatactagacaatttattttttcttttatcaagttattaccttaacatagattgttttcttagttgtgaaataattgtaaattccatgtatttcttttgggggataaatgaaatttcaaatggatttctattggaatcagttgacatctggaattaaaatcttgctgaagtttctgtgattccatctaagatactagattttctttgattttttttgttcttcactgtttctaaagcaattatggtagaaacaagactaaatgatagaagataaatgagacaaataggatgtagttaccagaacattggattgtgcaaaatggaacatttcagctgctatttctatcactagaacattatgacttcatgtggattttagaaaagtaataggtaaacgattccctagctcaagaatctctgaggacagctgaaggcctggagaccaacaataactagagggattcagatgggtgctgggcttgcttgctgaagcgtgcttggctgtgtcctggaacgctgagtagagtctgaagctggtcagagaaggtcataccctatttggcttttgctgttgtaatcttagaatcatgttttcccttattctaacagcttatcttccttgcccattttattagatgccaaactcatataatttttttaacctctaaatatctacttgtataggacaaaaataaactttcagcagccatagtgtatgaaggagtatctgtgattcttccatagtgtagataaagagaactagagaggatacacctcgtcatgcctcaggtcaagtcagcctcccctaaggctctagcggccatcagattgtagtggttatttcctgttccctcctgtctctgtcctccctccccttcatcagggcagcctgctgttcctcgacatcatggatgttgatggtagccccagctttgattgtctttctaccagtcaaccacgcaaagaaggagggagaaaactcttttggagaattccttggcccaatggaccaggcatctcttttcctcagctaagctttccttcttggtatgttacagggaaaggggaagcagtttgccagacagcaagtcaacccggtcttggaatgaggggaaggaggtttccctcggtcccagtaacactctagcagggccaagcattgaaggagtctgcattcaacttgcagaatctgtttagcactttctacacctccatcaggatgtattttattctctggttttagtttcctatctggtttgaagaggagaaaaataaaagtcatgaaacatatagcaagcacctgctccctttgacataagtcagcttgttcaattctcacaacaatcctataaaagagctgctattattcccatttaataacaataaaacggtggctcagagaaggtaaacatttttctaagttcttatacttaataaatctaaatccaaatttgtttttcattcttctttccatatcacactgctatatagttactatgttatcatctcacaatcactgatcaactccgacctttgtcttttttcctgataagtcaccttgttcttggcattgctttccatattcgtggctagcagtgtccttcccagggttagaggcaatgatgagttctttttcttgtgattgctcagtagaaaaggcacgaatggtgctgcaaacctaagacacctccaaacgttatacacttttgctaatagcaggaaaaatgacctctggatgctgccaaagtgagcactgcctttacgtatgatagaaaatacaattatacattttaaaatgatctcacagtcttgctttctaacttgaattcactgtcatttaactgatttataaggattcttggccacaactaaagtatattttaaacttataagtattctctaatgaggaacttttaaaagtccagataaaagcccactattcagtagttagaataattcagtgaaattaaccatgtaaatgctcaatgaagcaaatgattaaagaaggaatgaataaaaataaagattaaagtggatcaaattatattttgtctttttttatactgcttatagatcataattaaatagtggtggctcaaaagcacaaaaccaacctcatcacttaccaggtgtgaaaataatgttgatgtgtatgcttagttttagcgtgacaaagcagatacactttttcacttttaaaaaaaatcactcaatgcatcattctttaatgtttgcttttgtgatgatcactgaatatagaaagtcttttgattttagaataattttaagtctttgcctgctgataacctcagacacagacctgcagccagaattggttgagagttctgctatcttctccaatgagggatatttgagtatatactaaataatcatatttatatactggcatttaaaaaaccaaatattctcatagttctcttcaacctcctgagctccttaatatagataatatagatggccacatttttgtcattatacagtcatgaaaagaagcctatgtaggtcttatccacatttacaagacaggaactgaagatcaaagaggttaagtgactttcttaagttcctcagataaacattttgaaacagctgagatgaaatacaggtgcgctgacttcaaagcacaagttcttttctctagagtgcactacccccaatgagttgacaaaattaaacaaaaactaagcagaattatattttcttacacatacttcatacaagtaatcattaagcagctacttggtactaaagtttctcccaggaggttgcagtgcagatgggtaagtaagctgctgtatgtgcccccaggccataggcatgtcagcagctatggataccacagtaaaataaatgactatcgagaaagcaggaggaacagctcaccaggggagcacagtgatgaagtgaaagcttcacctttcaggaattctacacagcccataaaaaaaaaaactctatcccctccctttcagagtgtttcttaacaactgcttaacacagaaatcatcaacgtattgttgtagatactgggattaatatgtgcagaacttcaaacagaacccagatctcatgactccaagtagaggacctgttccaataacccatgaaaataatcacaacatcctaatcatgttttcatccctgttttactttattagttgttaataggtccattggtcactgggacacccacatgggggttatatacctgttcatacacaagctatgagtctttgaagacagaagcatatgaggtcctgattttgctctagtatgaactcaaacaaattttttttcagactagtcaccctcatctttcaaaacatcagatcatttcagagctgcttctaggacatgtgaacttgggcagagagaattgctttttcttcactgtgttactgtagtgtaccagtcatatggctattctaagatctttaatcctcacttccttgtcaccctcatgaagggtccttcaaacttcttgatgacagccaggggcgagggagggcactccaggcagcaagctgacacaatttacaaaagcagttatcttctctcccgtgaagcaatgccgcctggtagaacaaatggtgcaacccatgcacacttagtttatccaccttgataatctaagtgtcaaggacagagcaagtaccattcataagactctctggagcatgcaggatactgacaagctttttatttatgacccagggtttaacccatgtgagctcatactttgtcttctgctaagccttccatagctccatctcaagtcctcctttaaggtgagggtcactggactgcatatcattcagttcccagctagttttctcttcatttatttgtgattttactcagattatgatattattagtttagaaggggttgctgtagtcaggacaatcagtaatgcacttctaaatactaggtagatcctccattctttgtggttaaactccttccaggttctagtttgtttgtttatttatttattggaagattcatacactttgcctttcttttcaccaccttggtttggtttacaagaaccaaagctagtttctctaaacccacttgattagtgtgtgtttgtgtgtgtgtgtatgtgtgtgtgtgtatgtgtgtatatatatatgtgtgtgtatatatatatatatatttttttttttttttttgagacagagtcttgcgttgtcatccaggctggagtgcagtggcatgatctcggctcactgcaacctccacctcccaggttccagcgattctcctgcctcagcctcccaagtagctgggattacaggtgcccgccaccatgcccagctatttttttttttttttgtatttttagtagagatggggttttactatgttggccaggctggtctcaaactcctgacttcgtgaactgcctgcctcggcctcccaaagtgctgggattacaggtgtgagccagcgcgcctggcttgattaatatattttatttctactacatcagacacagattctttttgcccaacatacataaccatgtagtcctacctaatatagtttcctctgtgtgtgtctgtgtgtgtgtgtgtgtgtgtgtctgtgtgtgtgtgtattatatatacaactagtaggaaaccccacatatccacatatctttctagatatcttatctccctattacaaaactcctctctcttgattattacactttataattttactccctatgtcatccaaagtgggactctcattgctgatggtctaagtcagtgagaccctgttgccttggccatatcagagtctctggatgcagggccctggaatcaccattttttaaaagctatgcagtgatgttactgtgaagccaggttcacattttcagcctttagaaaaggcctgttgacctaagttggagaatgctagccttgtccccaaaattgcctgtcttctgtagttattcagtcaatatttattggcaacaatcatgcaataagcaactcaaatgaaatatcctggctaatgtgggaccactctggcacctctgaagttagaggacgtgctactaacatttatcatttcagatctttctgatcgagtgggtaaaaaaagatactggaccattttagttgctatttcactgattttctgagactaggcaaacaaatacacaaagttttctccctccttctgctgttcagtcatcacaaagaaaaattaaggcctttgtatatactgagcaaactgttggggtaaagttataaaaatggcagacagatcttactttgccaaattaagacatttagcaagtattgtaagtgtgatgagtgacgggaataagtgcgggacacacttgctttgtctgacagatgtactaacctgattttgatctgccagagtacaggattcattccttccaggtgcattattccaaagtgcttttggctaaaaggcctcttaaaacctcaatttattgttctctatatagtatatttctatttgccatctctccattattttcacagctatcttgtgtcctaagttgggccctaagaaaaacaaactgtcctaaaccataggccaagatacctgaagaactgaggtggtagggcatggattttgggaaaacttttttatggaaatctctgtcttggaatttctctcaattagcagttcttgtactgtttacagcacgagaactgaaagcataacctgcttctcttatgaggtaaactgcatattctgggtgaatgttttctctccacaaaagccatttcacatgtttccagatcaattttgaagttgttttgacactttacacactttattttaaccttttgtttctgagtgtagtatcctcacctgtctacagcatgaggaattgaaggctctaccctgtctgtttgcctggcagagctggggtgactctgctgcttacacaccagccttcccactagactgaagcttgccaaggcaagggctctgaatgtggaagtgtttccctttccagggccctaaatatttctaacttgtatggcacctgggaacaaatcaaattatcttcttgactccaaatgaacctccaggccttcttagaaaagctgaaagaggaattaaagggggataatggctcatgcctgtaatctcagcactttgggaggcaaggcaggcggatcatgaggtcaggagtttgagaccagcctgaccaacatggtgaaaccctgtctctactaaaaatacaaaaactagctgggcgtggtggcatgcacctgtaatcccagctactcaggaggccgaggcaggagaattgcttgaacccaggaggcggaggttgcagtgagctgagattgtgtcactgcactccagcctgggtgacagagcaagcctcagtctcaaataaataaataaataaataaataaataaataaataaaaagggggagaggggatcaaaagcactagtctgcatccattcagagctatgtgtgcaatggggagtaaagccagcctagaacctgtgcatcatcccaggtgtgtttccagtcctcccttcccaccatgagacaaaatgaatggagacaaatttagatcctctaaaatgagaacaggaggccaaaatggtgggaatatataaacgacaagggcacatatcacttgctttactttagtcctgagatgcccaaggccagactccatggatgagtcttggggcacttttggtcccactctcttagccgtctcccagttcctgcaattcagaggaactccccaaattaattaatctgatgaactctgttctcgagatgacagtatctccatattatctgttcccaagtttcctttcaaaagggacaaatgaacaaggaggagacagcactaagtcctactcatttccaagtaaagcatatatatgctatttcccagcttgggggcaggctgggcaccctttcagtattttatgtctgcatctttgaatgagtctggttgttctctcaagggagttttactttatggctgaaaggaaacctgaagctgatttcttggcctttctctttaactcattcctctttctcccaccaaggtgtctgtaaagattctctctggaattgcctcgcttcctaaaagatattttaaacactaggagtagtgaatgcctactcattttatcaaggaggaaactgaaattcaaatcagaggagggccttgactaaagtcccatggacagttagtcacagttcacacaatggaagtccaagcccagttcactttctgctacactgccttgcttgccataacatcatctttcaattagccgtggtcgttgcctcctatgtatattcaacagaatcctgaagaaagcaagctgaacacgtttccaaattagcgagagcagctctgaataagaagaaaattcatggtaagtttatgggatggctccaggtgtccatctttctatcttcccttgttatcactttccctgttttgggtgtagggggagaaagaatttcccattggctgtctcctggggtgagcaaaaactgaatgtgtttaatctaggttttcctcagattccacgacttgtaataagcacatctttatactcttacctctccagctgttctctgtgcaaagctgaactaactaaaactgctgaaaataccagagctatttagggaatttccctaactgcttcaacattcttaaagtgactaatttaattggatttatagggcactacataataatgatatcctttggctatgttcttagtgggttctacacctgtaatgaaatccataatgaaaaggaaaacagaagtacatttgggatgcaaaaccacttaatttcctggacagccattaaaaatgtggcatccagtgcaataccttaactttgattttaccttcagacacctatgatgatgattctggttgttggttgtgggacattagaataattgtgtcagaagaattcccatcgcatcctagattcacacagcatttctcttactggaaacccaattcattagtcatctgagttggaaaactgggactctaacactggatgttgattttatttatttaatcttttgtgttctggtcttatttctgttgtatttggggggtcctgtctgctatctcctgttcctggtgttgaggtgtagtgttctatggcatttctgcatgtccttggactattttccaaggaatatttgtttaacaaacatccttcaaagatagaggcagtataaccatgaaatgtctccctccagggcaaggttagacaggtttgcttgaagctcccttcatagattgttttctagctttgggatttcttggttttggcaaaatatctatcctgtgagttgtatcaccctgagtccacttctacgtgactcccactctcgtcctccccatgacacttgagtgacaagggcaactgatcaaaacagaaagctcatgctgcctcctgtgttctccttaataaagttcattgtctctgatccaggagtctcatgtcttctgagatcatctatgaaactagcaggttaacttgttggctagcaagtagggttaaatctcagacccttcacagttcttgacacccaatttcttcttttttggagccttagccttagatctagatgattaagtcctgctacatgatcttcatcccagtatttctcccttgcttaagtggctcagcccatatttccagtaccagttcccactaaattacccactaaatgtggttccctccctgtggtcacaaggaaatagagaatttttgtagttctctagaatgggcaggacagacatatttgaatgtatttgcccattctaattatttgatagtgacagtctagggcttatgatggagggattcagtcgttgtatctaaattcagggtgaaaggattgcatgatcaataggtaggtataagaaatggtctagatacttaaagtccaaaacatctgcatcagggctccagagtcaggtgcacccaatgctaaatgatatgaagaactggtaattagagtggtacatacatacaaagtgagctatttttgatgatagtgaagccactatccatttaagtaggtaactactctggttatcacagaggaaaatgtgggaaaatatgccaaattttctccaatcctttctgtaattcctctgtagacgtgcaagtatgatccttctcatgaggtttaagggtggaaaagcacaactaacgtgggcattagtgctataaagccactgttaatttaacaagtttatagaatgtgctggtaatttacaaagtttaaaatggtgacatttctgtctattttccagtaccaggaaaatctgtaagtctcctgaacatttaactttttaaaaataaaaactgtggtacttgttattaacatattctttgctttgcctgttagaaaacctaggaggaattttttctattaaccagaaacagttctcaaactctgatacacattagaaacaccagaaaaatcttaaaattactgatacttgggtttcgccaccccagattctcacttaattggtatgtaatggatcctgagattttttttttcttttttttttgagatggagtcttgctctgtcacccaggctggagtgcagtggcgagatctcggctcactgcaacctccgcctcccgggttcacgccattctcctgcctgattctcccgagtagctgggactacaggcacccgccaccatgcccggctaattttttttctgtatttttagtagagacggggtttcactgtgttagccaggatggtctcgatctcctgacctcatgatcggcccgcctcggcctcccaaagtgctgggatggatcctgagattttttgaaagttcatcatacaattaaaatatgaagcaatgatttgaaaaacactattttataggattttaaactgtctagaattcagttttggactagtatatagtagggatcaaacttttattttcccaaatagccaacttttccaatgttatttatatcttctacttttatttagtagtttttttttcatcattgatctttaaaatgatatccttataaattccatatatctgaatctgtttctggattctctatgttttccacttggtttatttgacaactttttaaccagtatcacaccatttaaattactgcagatttatggagtgttataataactaggagaacaagttttgccttattgcactattttttcaaaatattattggccatgttatacattttatttttcagagaaaaatgtaggagatttcgatcaagtttcatcgtctgatgttttgggccatagggaaccagtcagtctctgtattccagtttgtgaagtacggtgttttgattggtcacacctgagtcttatgatctaaccttggagcaccgtctgagagcacacgatgtgagaacaagaaaggtggttttgggagatagaatgtggtgtcagaactatagagtgagaaaaattagagatggggatcctgttaccttgaagggcagggatgcctgttttgatgcctgaagcatccaaacccagcaatatccctaattttattttgcttttatggtaccaagaatgagtccaggagataattttaaatggtagtgctccaaaaagtgatacatgtacgctacatgaagtggttacaaatgaactattgttgttcatgaactccacatacccatcattaagtgtgcttttcaatactgcattactgtggctgccttcaagattgtgctgtaaaatttccctacattaacttttcacttattcagagcatcccattagtttacatgagagaaaaggaattagaaagataaggagtctaagaaaccttaatagatgggagaattctattaagtaagcataatcaggcaaggagtctcttggaattgaattggaatttcaaggtcacaagtcctatcaatccgctccctctaaaatcaccttctcatcatcctagcagatgagtcctccatccccacatcctacataactgcttcaataaactctcattaaggattccattgaagataccatgttttttcctatctcagggccttggtacatactctttttactgcctaaaaattccctcaccttctttttttccttttgtctagctaactataactcatacattcaatattttcctggtagtattttcttagaaatacttagggagcttagagtgacattcaagctccttcatagtttgactaccacctatgtattgttttggtctatctcctagtaagccaggctagtcacctaaatgccctcctttctcctattgtttatggttgtgtcacttgcatacattacctgcttgtagagcagccctcccactcaggagtaataggttttattcctacgaactaacatgcacttgacttgtacttagtcacattttgactagaattacagggacttgaaggtatgtgttgtgtctggatctgcccatatgttcaaggtatttcttccaagtaagtctgcattactccagggtaagcgccagacttcctcatttttctacctttcatggaacttttgcgtgagtggcaaggaatactcaatggcagtgtttctcaagctttaccctcatcaaaatgacctggagaccttgctaaaacacgattgttgcaaccacccctcataccctgtacccaccaagcctaaatccatctcagatggagcccaagaatttgcatttcttataagctccagtgatatttaggctgccagtgctaaaatcacactttgaaaaccactattccgtgacactgttttaaaaactggttgcatgttaaaatctcctagaaacggttaattaagattttttttttaaagactgtgcttgggctcccctctagacaaatcaagatctctgaggatgccacttttctcatgaaaagaaaaaaattcaacaatccgcaactgttaggagattttaatatgcagctagtgttgaaaatcactgttcatacaaatggcagatgagtaagcagagtcatgaacaagagagcaggcttgctgggagcctaggccagagcaaatgtcataacctcctgaggcagcgtgagttagggcatgcatctcacattttaatgtgcttgcccggaagatgacgatagtaaatctgggatgtctctgaaatgctgctggtctaacaagctcccagatgattcctatccgtgaaccccactctgattagcaaagttgggatatccatgaagaaaaaagggtcagtgcgtgcaagggatgacaaaggcaggtgagtgaaatgggcttgagagcccacatccggtaatcctttagaatttcaaacataagaaagaaggggaagtgctggggggtgggttcccctgtggaggaagttacttctaagccatcagtttaagactttaagtgaatttctggggaaagcatccagttttgataagtctggcccagactaaatatataatttctacctaattaaggaggcaggcacacaggcaaaaaggtaaatgcagcttctggaggcacatcctaacagaaccccagagaaattttatcaaagtctgtgggctttctccatcttcttagctgccttcattgagaagtaaatttccatgggagaaaattagggttttgcttcattcccagtagctggcattaaattagtcctgtagaatgtgtttggagatcatgttgatgagcagagattgtctaagcagcaggtgttacgaattcatttaatcatttaaccacacaccctgcacatatttcagctttcttaggttgacttttatttgcaaaacacctatctgaaggtgtgttatagtggatgtataattgatggtgcttgtcgaattttatgctctataaatgccagatacattttccccaagtatgctctttcttgatccatttctctaaagtaaacatttgaaacaaatttaactcttgagggattctggcaggactcactttctcactgattttagagcttgtgttcaggttggggagagagcattatagtttccagactcagctcagtgtaaaaccatcgtgcccagacaactcacttaaaaggaacaggaaagtgcagttagagagcctttactccacccatctagatgccaggctaccaccaatgggcatcttgttttccctcttttctctctcattggaagagagagagagagagagcgaaagagagagagagagagagtgtgtgtgtgtgtgtgtgtgtgtgtgtgtgttttactacctgtagtagtttgaatggtgacctggtgaccctcaaaaaggtatgtctgcatcttgaaacctgtgactatgaccttatttggaaaaagtgtcttttgcagacgtaattagagatcttaagacaagatcatcttagattatccaggtggattctaattccaaggctaactgtccttataagacacaaaagaggagaaggccacatgatgctggaggcagagatgagagtgatgcacctgtagccctagaagcctccagacctggaagaggcaagggacggaatttccctggagcctctggagaaggaaactttgtggagcctgtggaaaccgattttggacttctatcctccaggattgtgacagaataaatttccatttttctaaaagtcacccagtttgtagtaatttgttatagcaaacccaagaaaatgaatatactatgcatcagcttggggtcgggaggtggggcacagaaaaagaaaacaagttcccaggccctcctaaaagtcattttgtttaacatttgatccatgcatttgtcatgccctccaaaggggacttctgcagaaaagttctcagtgtccttcaataagatagagcctttctttgctcctaccctaaccttgaatcaaatacagcttggtgggccctgacgctagaggaattctcagtggctgggctggcggagagctatctatttgtgtatagggttgcagccaaagtctttaaactaaaactaaaactctgtggattaaataaaatactggacatgcaaaagaagattctcttcgggaatccctgtgtactagcccctctgtgtagtgaatgctatcactttttcttctcgcttttctagataggcatctagaaaggtgttcaatctcttgggggtaatccataggcctccagggttatttccaaaagtcttgttgatgttatcagtgttaacacagaacctcttctgattagtgttcaatcttactatggaatagcttttttctctcaaatattattagaaaattagtaaaacataaaaatgatcaggtttggccagttttacccctactgtcctactgctattcaaagacctagcacttctgtacatacgagtaaactgcactcgaaatggtattctctgtttctgcttctacttaggttccaaggcaggtaagcagtctaaccagatgacaggtgagcaatctgaggtgaagtgacttcccattacatgacttttgacccccatcgttgtcttggaaatactttatgctaagtattagaaagaaggaaaacctactggctgttgcaaacaatttaaaataacttaaagtggaagaaagaagaaaaaagcagagtgaaattttatagggtggggaaaacctggaggaaactttcctttgaaagccaggagtccaaactatagataggatagtacagaaattcagcaatccccaagtgttctagcagaatttaaaacagaggatgaaacttggagaactctgggctagttgtgaccttcagatatactttaaaaaaatcaactaatattttaaaatcagtattttcacataagattatgactttttttttcttttgaaaattttgtaagatctggcagcattgggcctttattgctgcattgtcaggaactgggctatgggtgttccttccagttgagggctgtttgaggtctactctgtcatctacctggccagtcccagcaaagctggatgtagttaaacatggaaggcacaactggactaggggaattggataagtccttgaacaagtacctgagttaaaacatcataagttaaaaggaggggatactggtgtgagttctgtttctcaaaaatgggtgtggagttctaaaattaatgttaatttgggttccattttttccaatttccccactctctgccatattgtattctttgacttagcattagacttagataagttagttaatattcctgtaacttcggtgcttcatacacaaaatgggaacaattataactacctcctaagattttagtaagactgaataagacaatggataacaacgacacagcataatgcctgaagcatcataagcacttaaatgttggttgctattatgattggtattctttaaaaagtgctattacttgccattattgacttttgaaactggagggttcaaacaaacaagatgttgagaggctcaggcaaccagtatggttggaaataataagaaagttagttacctaccgtgatactacactaacccttgaaaaaacgtgtggcgtttaaagaaatttctgctaaatttctgtttggcttcagcaaaacctcgtgttccactttcagagcatgaaagaggcagttaaggcaagaaaagcgcatttagaagtttaaagaatgcaagtatcctatgggttgagaaatgagattaatccttccttgactagtgctctttttactggcaggataaattctttaggaaaaagagttatgctggctgtggaagtaaatagtgacaggtgttcttttgtttattttctatgtatttttcaaccccaggtccattttattctcaaatgtaacttcttttcttagtcaacctgctttttggtaaaattgttcttaaagcattcagcttacataattaaatatggttgtgtggttaccttttatatccgaatgtaaggacctccatataatctaattattttttccattaaaaaaagatatttcacagacacaagctataggtaaggattcattacaaaggaatctcattgttttaaatgagcaattccattatttttgattctgccgagagtgggacctaattctgtcaaagagagaaggttgttaagatttggtggtcagaaacacatgacttccaatcaaatttagcagtcctaactatcgaattaggtgttgtaagtttatgtgggctttcctaaggtgaattgactacagggggcatagttctatctaaggaataattagttatgttgagattcaatgttatttgcatatttgtgtctttgaaattcctctgaaaatgagtaatttttagcaattattcttggtgtttgagtccattgagctagtcaaaaatttataattgcaaaaactttggccaaattatcagatagagctaagattcggtttggggtcttaggaattcctattatctccttgaactttgggatgtatcagttattagaatttagacagtcaacgagcttgttgaaattttttttggaacaagatcagtggaatgaatggaaacaaagaagggcatatatttgtagaggaggaaaaggagtgatttgcagaagataaaaaaggaagaagataaaggagaggacggaagggggaaataaaattcacataaattgcttatcactgatattatagaagtaaactattttataacagtatctgcaatttattgttcacatagccttcaaagaaagaaagaaatgaagcagtaaatcaccttgcctcaaattataattttccttacttgtgcgatatttattgagcgattttatgcacagtgttgtgtttagtggtgaggatatgtagcacataggacaaaacttcccgttatactggtatagtatgt

SEQ ID NO: 421 - protein, 796 aa, Mus musculus; identical to SEQ ID NO: 41
  misc_feature (385)..(385): Xaa is any amino acid

1. An isolated nucleic acid sequence comprising a DPP10 mRNA sequence.

2. An isolated nucleic acid sequence according to claim 1 where the sequence encodes a human DPP10, or a sequence complementary or substantially homologous thereto, or a fragment thereof

3. An isolated nucleic acid sequence according to claim 1 where the sequence encodes a mouse DPP10, or a sequence complementary or substantially homologous thereto, or a fragment thereof.

4. An isolated nucleic acid sequence according to claim 1 comprising one or more exons of DPP10, or a sequence complementary or substantially homologous thereto, or a fragment thereof.

5. (canceled)

6. (canceled)

7. A vector comprising the isolated nucleic acid sequence of claim 1 to enable in vitro or in vivo expression of DPP10.

8. A polypeptide sequence encoded by the isolated nucleic acid of claim 1 or a sequence substantially homologous thereto, or a fragment thereof.

9. A polypeptide sequence according to claim 8 where the polypeptide is a soluble DPP10 protein lacking a transmembrane domain.

10. A polypeptide according to claim 8 which is operably linked to a secretion signal.

11. A polypeptide according to claim 10 where the polypeptide comprises a Histidine tag.

12. A fusion protein comprising the polypeptide of claim 8 where the fusion protein is linked to a carrier.

13. A polypeptide sequence according to claim 8 where the polypeptide is post-translationally modified.

14. An antibody specific for the polypeptide sequence of claim 8.

15. An antibody which reacts with an antigen of a polypeptide according to claim 8.

16. An antibody according to claim 14 which is specific for the soluble form of DPP 10, the β-propeller domain, the external domain or the catalytic domain.

17. An antibody according to claim 15 which reacts with the soluble form of DPP 10, the β-propeller domain the external domain or the catalytic domain.

18. An antibody according to claim 16 where the antibody is a chimeric antibody or is humanised.

19. (canceled)

20. A process for the preparation of a nucleic acid sequence according to claim 1 comprising ligating together successive nucleotide and/or oligonucleotide residues.

21. A process for the preparation of a polypeptide according to claim 8 comprising ligating together successive amino acids and/or oligopeptides.

22. A process according to claim 21 where the polypeptide is produced in a cell free system.

23. A transgenic non-human animal comprising the vector of claim 7.

24. A transgenic non-human animal that does not substantially express DPP10.

25. A transgenic non-human animal that encodes a variant of DPP10 which results in disease.

26. A method of diagnosing, or determining susceptibility of a subject to inflammatory disease comprising determining the presence of a variant of DPP10 which is associated with a disease state, or measuring the level of DPP10, in a sample.

27. A method for diagnosing disease or predisposition to DPP10 related disease, comprising determining the presence or absence of a risk allele of a SNP at position 259007, 267901 and/or 318524 of FIG. 1, wherein presence of the risk allele is diagnostic of disease or predisposition to disease.

28. A method according to claim 27 wherein the risk allele is any nucleotide residue other than adenine at position 259007; any nucleotide residue other than adenine at position 267901 and any nucleotide residue other than thymine at position 318524 of FIG. 1.

29. A method according to claim 27 wherein the risk allele is a cytosine residue at position 259007; a guanine residue at position 267901 and a cytosine residue at position 318524 of FIG. 1.

30. A method accordingly to claim 27, further comprising determining the presence or absence of a risk allele of one or more of the SNPs of Table 1a, 1b, 1c or Table 3.

31. A method according to claim 27, wherein the method is performed on a sample.

32. A method according to claim 27 comprising removing a sample from a subject, and isolating nucleic acid therefrom.

33. A method of preventing or treating disease in a subject wherein the method comprises modulating the activity, expression, half life or post-translational modification of DPP10.

34. A method according to claim 33 where the disease is inflammatory bowel disease, asthma, atopy, rheumatoid arthritis or psoriasis.

35. A method of treating or preventing disease according to claim 33 comprising determining the presence or absence of a risk allele of a SNP at position 259007, 267901 and/or 318524 of FIG. 1; and if a risk allele is present, administering treatment in order to prevent, delay or reduce the disease.

36. A method according to claim 35 where the treatment comprises administration to a subject of an agent capable of modulating the effects of the risk allele.

37. A method according to claim 35 where the disease is inflammatory disease, such as inflammatory bowel disease, asthma, atopy, rheumatoid arthritis or psoriasis.

38. An isolated nucleic acid molecule comprising a SNP in a DPP10 nucleic acid molecule.

39. An isolated nucleic acid molecule as claimed in claim 38 comprising part of a sequence of FIG. 1, and comprising one or more SNPs at positions which correspond to the positions of FIG. 1 listed in any one or more of Tables 1a, 1b, 1c or 3.

40. An isolated nucleic acid molecule comprising a SNP at the position corresponding to position 318524 of FIG. 1, or at the position corresponding to position 259007 of FIG. 1, or at the position corresponding to position 267901 of FIG. 1.

41. An isolated nucleic acid molecule which hybridizes under stringent conditions to a nucleic acid of claim 38.

42. An isolated nucleic acid molecule according to claim 41, which is capable of distinguishing between alleles of a SNP of Table 1.

43. A primer sequence as described in Table 2.

44. A vector comprising an isolated nucleic acid molecule of claim 38.

45. A host cell comprising the vector of claim 44.

46. A polypeptide sequence encoded by the isolated nucleic acid of claim 38 or a sequence substantially homologous thereto, or a fragment thereof.

47. A polypeptide sequence according to claim 46 where the polypeptide is a soluble DPP10 protein lacking a transmembrane domain.

48. A polypeptide soluble DPP10 protein according to either claim 47 which is operably linked to a secretion signal.

49. A polypeptide according to claim 48 where the polypeptide comprises a Histidine tag.

50. A fusion protein comprising the polypeptide of claim 46 where the polypeptide or fusion protein is linked to a carrier.

51. A polypeptide sequence according to claim 46 where the polypeptide is post-translationally modified.

52. An antibody specific for the polypeptide sequence of claim 46.

53. An antibody which reacts with an antigen of the polypeptide according to claim 46.

54. An antibody according to claim 52 where the antibody is a chimeric antibody or humanised or bifunctional.

55. (canceled)

56. A host cell comprising the vector of claim 7 for producing recombinant DPP10 gene products, or for use in the regulation or analysis of DPP10.

57. A host cell comprising the vector of claim 7 for producing recombinant DPP10 gene products, or for use in drug screening systems to identify agents for use in diagnosis or treatment of individuals having or being susceptible to inflammatory disease.

58. (canceled)

59. A transgenic non-human animal comprising the isolated nucleic acid molecule of claim 38.

60. A kit for diagnosis of disease or predisposition to disease, comprising a means for determining the presence or absence of a risk allele of a SNP of Table 1a, 1b, 1c or Table 3, wherein the risk allele is diagnostic of disease or predisposition to disease.

61. A kit accordingly to claim 60, comprising means for determining the presence or absence of a risk allele of a SNP at position 259007, position 267901, and/or position 318524 of FIG. 1.

62. A method of identifying a compound for treatment of disease, comprising (a) administering a compound to tissue comprising an isolated nucleic acid molecule comprising a SNP at a position listed in Table 1a, 1b, 1c or Table 3; and (b) determining whether the compound modulates downstream effects of the SNP.

63. (canceled)

64. (canceled)

65. A pharmaceutical composition comprising a polypeptide according to claim 8.

66. A pharmaceutical composition comprising an antibody according to claim 14.

67. A screen for identifying an agent which modulates DPP10 activity comprising:
providing a DPP10 polypeptide sequence as claimed in claim 8;
providing a DPP10 substrate;
providing an agent to be tested;
measuring whether the agent to be tested modulates DPP10 by measuring processing of the DPP10 substrate.

68. A screen according to claim 67 where the substrate is a molecule having the XPXS motif, a molecule having the generic formula of NH₂X—P(X)_{y}S—(X)ₙ, or a chemokine.

69. A screen according to claim 68 where the XPXS motif or the generic formula NH₂X—P(X)_{y}S—(X)ₙ is present in a small peptide molecule.

70. A screen according to claim 67 where the substrate is fluorescently labelled.

71. A screen according to claim 67 where the DPP10 polypeptide is purified.

72. A screen according to claim 67 where the measurement of the processing of the substrate comprises measuring protease activity.

73. A screen according to claim 67 where the DPP10 polypeptide is expressed by a cell.

74. A screen according to claim 67 where the agent to be tested is a non-biological molecule or a biological molecule.

75. A screen for identifying an agent which modulates DPP1O activity comprising:
providing a DPP10 polypeptide as claimed in claim 8;
providing an agent to be tested;
providing a first cell; and
measuring whether the agent to be tested modulates DPP10 by measuring adhesion of the cell to a surface.

76. A screen according to claim 75 where the surface is the surface of a second cell.

77. A screen according to claim 75 where the surface comprises a non-biological molecule.

78. A screen according to claim 75 where the surface is a biological molecule.

79. A screen according to claim 75 where one or more of the first cells are immobilized.

80. A screen according to claim 75 where one or more of the first cells are a lymphocyte.

81. A screen according to claim 75 where one or more of the first cells is a cell transfected with a vector comprising an isolated nucleic acid sequence comprising a DPP10 mRNA sequence.

82. A screen for identifying an agent which modulates DPP10 activity comprising:
providing a DPP10 polypeptide as claimed in claim 8;
providing an agent to be tested;
providing a cell;
measuring a change in differentiation or proliferation of the cell.

83. A screen according to claim 82 where the cell is expressing the DPP10 polypeptide.

84. A screen according to claim 82 where the cell is a T-lymphocyte.

85. A screen according to claim 82 where the change in cellular differentiation is T-cell activation.

86. A screen according to claim 82 where the change in cellular differentiation involves a change in expression of a cell signalling factor.

87. A screen according to claim 86 where the cell signalling factor is an immunomodulator or a peptide regulatory factor.

88. A screen according to claim 82 where the cell is cultured following removal from a patient or experimental animal.

89. A screen for identifying an agent which modulates DPP10 activity comprising:
providing a transgenic animal according claim 23;
providing an agent to be tested;
contacting the transgenic animal with the agent to be tested;
detecting a change in the transgenic animals phenotype.

90. A screen according to claim 89 where the change in phenotype involves a change in T-cell phenotype.

91. A screen according to claim 89 where the change in phenotype involves a change in B-cell phenotype.

92. A screen for detecting a side effect associated with the use of an agent which modulates DPP10 comprising:
providing a cell which does not substantially express DPP10;
providing an agent to be tested;
contacting the agent to be tested with with the cell; and
measuring any side effect produced by the agent on the cell.

93. A screen according to claim 92 where the side effect involves a change in cell differentiation.

94. A screen according to claim 92 where the side effect involves a change in cell proliferation.

95. A screen according to claim 92 where the cell is part of a transgenic animal.

96. A screen according to claim 92 where the side effect is a measure of the change of phenotype.

97. A screen for identifying an agent which modulates DPP10 activity comprising:
providing a DPP10 nucleic acid according to claim 1;
providing an agent to be tested;
measuring whether the agent to be tested modulates DPP10 by measuring the interaction of the agent with the sample of nucleic acid.

98. A screen according to claim 97 where the screen is an in vitro transcription assay measuring transcription of DPP10.

99. (canceled)
